(19) United States
(12) Patent Application Publication
(10) Pub. No.: US 2024/0317871 A1
(43) Pub. Date: Sep. 26, 2024

(54) Anti-HVEM Antibodies

(71) Applicant: Immunomic Therapeutics, Inc., Rockville, MD (US)

(72) Inventors: Teri Heiland, New Market, MD (US); Wenhai Liu, Germantown, MD (US)

(73) Assignee: Immunomic Therapeutics, Inc., Rockville, MD (US)

(21) Appl. No.: 18/270,036

(22) PCT Filed: Dec. 29, 2021
(86) PCT No.: PCT/US2021/065491

§ 371 Date: Jun. 28, 2023

Related U.S. Application Data
(60) Provisional application No. 63/131,829, filed on Dec. 30, 2020.

(51) Int. Cl. C07K 16/28; G01N 33/569; G01N 33/574

(52) U.S. Cl. CPC C07K 16/2878; G01N 33/56988; G01N 33/57484; C07K 2317/92; G01N 2333/16; G01N 2333/70578

(57) ABSTRACT

The present application provides specific antibodies that bind to HVEM and that were generated using LAMP technology, which allowed for the presentation of novel, three dimensional epitopes improving the production of anti-HVEM antibodies. In the past, therapeutically effective antibodies directed to HVEM were difficult to generate which the present invention has overcome. Also provided are uses of these antibodies, methods of making these antibodies and polynucleotides and host cells related to these antibodies.

### FIELD OF THE INVENTION

[0001] The invention relates to specifically disclosed antibodies that bind to the HVEM protein as well as methods and compositions for detecting, diagnosing, or prognosing a disease or disorder associated with aberrant HVEM expression or inappropriate function of HVEM protein using antibodies or fragments or variants thereof, or related molecules, that bind to HVEM.

### DISCUSSION OF THE RELATED ART

[0002] In the following discussion, certain articles and methods will be described for background and introductory purposes. Nothing contained herein is to be construed as an “admission” of prior art. Applicant expressly reserves the right to demonstrate, where appropriate, that the articles and methods referenced herein do not constitute prior art under the applicable statutory provisions.

[0003] Cancer is the second leading cause of death in the United States, exceeded only by heart disease. Despite recent advances in cancer diagnosis and treatment, surgery and radiotherapy may be curative if a cancer is found early, but current drug therapies for metastatic disease are mostly palliative and seldom offer a long-term cure. Even with new chemotherapies entering the market, the need continues for new drugs effective in monotherapy or in combination with existing agents as first line therapy, and as second and third line therapies in treatment of resistant tumors.

[0004] Recent efforts in treating cancer focus on targeted therapeutics or treatments that specifically inhibit vital signaling pathways. However, drug resistance and cancer progression invariably develop. Antibodies are increasingly being developed as anti-cancer therapies. However, the ability to generate antibodies, even fully human antibodies, even with the state-of-the-art tools, can still be difficult.

[0005] Herpesvirus entry mediator (HVEM), also known as tumor necrosis factor receptor superfamily member 14 (TNFRSF14) or CD270, is a human cell surface receptor of the TNF-receptor superfamily. In recent years, HVEM has been found highly expressed on hematopoietic cells and a variety of parenchymal cells, such as breast, melanoma, colorectal, and ovarian cancer cells, as well as gut epithelium. HVEM is a bidirectional protein, either inhibiting or stimulating T cells, through binding to BTLA or LIGHT (TNFSF14). However, effective therapeutic antibodies to HVEM have been historically difficult to obtain.

[0006] Therefore, a clear need continues to exist for efficient and cost-effective methods of producing antibodies, especially where there has been difficulty in obtaining such antibodies to a particular antigen in the past. Thus, there is a need to develop new and improved antibodies directed to HVEM to be used to treat cancer and HIV in patients, as well as to be used to diagnose and/or prognose irregularities in the HVEM protein.

### SUMMARY OF THE INVENTION

[0007] This Summary is provided to introduce a selection of concepts in a simplified form that are further described below in the Detailed Description. This Summary is not intended to identify key or essential features of the claimed subject matter, nor is it intended to be used to limit the scope of the claimed subject matter. Other features, details, utilities, and advantages of the claimed subject matter will be apparent from the following written Detailed Description including those aspects illustrated in the accompanying drawings and defined in the appended claims.

[0008] The present invention comprises the results of generating antibodies in a non-human vertebrate wherein the non-human vertebrate was injected with a LAMP Construct comprising a HVEM antigen. The HVEM antigen was then efficiently presented to the immune system with the help of LAMP in the non-human vertebrate to raise novel antibodies against the HVEM antigen.

[0009] Specifically, by combining presentation of the specifically selected HVEM antigens with LAMP, the HVEM antigens were effectively transported to the cytoplasmic endosomal/lysosomal compartments, where the HVEM antigens were processed and peptides from it presented on the cell surface in association with major histocompatibility (MHC) class II molecules. This novel presentation generated unexpectedly functional antibodies to an antigen that was known in the past to be particularly difficult to raise therapeutically effective antibodies. Attempts in the past to raise such anti-HVEM antibodies were either unsuccessful or lacked activity. In contrast, the novel antibodies described herein were unexpectedly activity. Thus, in some embodiments, an anti-HVEM antibody comprises: (a) an antibody selected from any one of the antibodies listed by either AntibodyID or Ab_Num_Id as described in Table 1; (b) an antibody comprising a heavy chain amino acid sequence selected from any one of the amino acid sequences of SEQ ID NO:1-201; (c) an antibody comprising a light chain amino acid sequence selected from any one of the amino acid sequences of SEQ ID NO:874-1032; (d) an antibody comprising a heavy chain amino acid sequence selected from any one of the amino acid sequences of SEQ ID NO:1-201 and a light chain amino acid sequence selected from any one of the amino acid sequences of SEQ ID NO:874-1032; (e) an amino acid sequence having at least 70%, at least 75%, at least 80%, at least 85%, at least 90%, at least 91%, at least 92%, at least 93%, at least 94%, at least 95%, at least 96%, at least 97%, at least 98%, at least 99%, or at least 100% sequence identity to any one of (a)-(d); (f) the amino acid sequence of (e), wherein CDRH1, CDRH2 and CDRH3 of SEQ ID NO:1-201 is maintained; (g) the amino acid sequence of (e), wherein CDRL1, CDRL2 and CDRL3 of SEQ ID NO:874-1032 is maintained; (h) the amino acid sequence of (e), wherein the CDRH1, CDRH2, and CDRH3 of SEQ ID NO:1-201, CDRL1, CDRL2 and CDRL3 of SEQ ID NO:874-1032 is maintained; (i) an antibody comprising a CDRH1, a CDRH2, and a CDRH3 selected from an amino acid sequence of any one of SEQ ID NO:1-201; (j) an antibody comprising a CDRL1, a CDRL2, and a CDRL3 selected from an amino acid sequence of any one of SEQ ID NO:874-1032; (k) an antibody comprising a CDRH1, a CDRH2, and a CDRH3 selected from an amino acid sequence of any one of SEQ ID NO:1-201 and a CDRL1, a CDRL2, and a CDRL3 selected from an amino acid sequence of any one of SEQ ID NO:874-1032; (I) an antibody comprising a CDRH1, a CDRH2, and a CDRH3 selected from an amino acid sequence of any one of SEQ ID NO:1-201 and a CDRL1, a CDRL2, and a CDRL3 selected from an amino acid sequence of any one of SEQ ID NO:874-1032, wherein said selection of CDRH1, CDRH2, CDRH3, CDRL1, CDRL2, and CDRL3 are selected from the same AntibodyId as described in Table 1; (m) an antibody comprising at least one of SEQ ID NO: 202-873 and/or at least one of SEQ ID NO: 1033-1449; (n) a single-chain variable fragment (“scFV”) comprising any one of (a)-(m); or (o) a variable domain comprising any one of (a)-(m); and wherein said antibody binds to HVEM. The amino acid sequences for each variable domain of a heavy (SEQ ID NO:1-201) and light chains (SEQ ID NO: 874-1032) are described in Table 3.

[0010] Thus, the present disclosure also encompasses, for example, an isolated antibody that binds to HVEM, comprising: (a) a heavy chain comprising VH CDR1, VH CDR2, and VH CDR3 comprising, respectively: SEQ ID Nos 285, 464, and 709 (consensus cluster 11); SEQ ID Nos 298, 470, and 720 (consensus cluster 20); SEQ ID Nos 304, 478, and 729 (consensus cluster 5); SEQ ID Nos 310, 481, and 733 (consensus cluster 23); SEQ ID Nos 321, 495, and 751 (consensus cluster 21); SEQ ID Nos 328, 504, and 753 (consensus cluster 10); SEQ ID Nos 336, 513, and 776 (consensus cluster 8); SEQ ID Nos 340, 514, and 783 (consensus cluser 15); SEQ ID Nos 347, 522, and 795 (consensus cluster 19); SEQ ID Nos 351, 525, and 801 (consensus cluster 14); SEQ ID Nos 355, 530, and 808 (consensus cluster 6); SEQ ID Nos 356, 531, and 811 (consensus cluster 12); SEQ ID Nos 358, 535, and 815 (consensus cluster 4); SEQ ID Nos 361, 538, and 816 (consensus cluster 9); SEQ ID Nos 364, 541, and 821 (consensus cluster 17); SEQ ID Nos 366, 544, and 826 (consensus cluster 7); SEQ ID Nos 367, 547, and 829 (consensus cluster 13); SEQ ID Nos 369, 550, and 833 (consensus cluster 18); SEQ ID Nos 371, 553, and 837 (consensus cluster 22); SEQ ID Nos 374, 557, and 841 (consensus cluster 16); SEQ ID Nos 338, 513, and 844 (consensus cluster 1); SEQ ID Nos 375, 559, and 845 (consensus cluster 2); or SEQ ID Nos 376, 560, and 846 (consensus cluster 3); and (b) a light chain comprising VL CDR1, VL CDR2, and VL CDR3 comprising, respectively: SEQ ID Nos 1099, 1230, and 1343 (consensus cluster 6); SEQ ID Nos 1129, 1246, and 1376 (consensus cluster 7); SEQ ID Nos 1136, 1249, and 1387 (consensus cluster 3); SEQ ID Nos 1142, 1251, and 1399 (consensus cluster 5); SEQ ID Nos 1152, 1248, and 1411 (consensus cluster 1); SEQ ID Nos 1155, 1256, and 1416 (consensus cluster 4); and SEQ ID Nos 1159, 1258, and 1422 (consensus cluster 2). the heavy chain further comprises an FR1, FR2, FR3, and FR4 corresponding to the consensus cluster of the VH CDR1, VH CDR2, and VH CDR3, and/or wherein the light chain further comprises an FR1, FR2, FR3, and FR4 corresponding to the consensus cluster of the VL CDR1, VL CDR2, and VL CDR3.

[0011] The disclosure also encompasses, for example, an anti-HVEM antibody that comprises a heavy chain comprising VH CDR1, VH CDR2, and VH CDR3 and the VL CDR1, VL CDR2, and VL CDR3 of any one of Ab_001, Ab_006, Ab_008, Ab_009, Ab_010, Ab_011, Ab_012, Ab_013, Ab_025, Ab_026, Ab_027, Ab_028, Ab_029, Ab_030, Ab_031, Ab_034, Ab_035, Ab_036, Ab_043, Ab_044, Ab_045, Ab_046, Ab_050, Ab_051, Ab_058, Ab_063, Ab_159, Ab_064, Ab_065, Ab_066, Ab_067, Ab_068, Ab_069, Ab_155, Ab_070, Ab_071, Ab_149, Ab_072, Ab_073, Ab_074, Ab_078, Ab_079, Ab_080, Ab_083, Ab_153, or Ab_087. In some cases, the heavy chain comprises a heavy chain variable region (VH) with an amino acid sequence that is at least 90%, at least 95%, or at least 97% identical to that of the VH of Ab_001 Ab_006, Ab_008, Ab_009, Ab_010, Ab_011, Ab_012, Ab_013, Ab_025, Ab_026, Ab_027, Ab_028, Ab_029, Ab_030, Ab_031, Ab_034, Ab_035, Ab_036, Ab_043, Ab_044, Ab_045, Ab_046, Ab_050, Ab_051, Ab_058, Ab_063, Ab_159, Ab_064, Ab_065, Ab_066, Ab_067, Ab_068, Ab_069, Ab_155, Ab_070, Ab_071, Ab_149, Ab_072, Ab_073, Ab_074, Ab_078, Ab_079, Ab_080, Ab_083, Ab_153, or Ab_087, and/or the light chain comprises a light chain variable region (VL) with an amino acid sequence that is at least 90%, at least 95%, or at least 97% identical to that of the VL of Ab_001, Ab_006, Ab_008, Ab_009, Ab_010, Ab_011, Ab_012, Ab_013, Ab_025, Ab_026, Ab_027, Ab_028, Ab_029, Ab_030, Ab_031, Ab_034, Ab_035, Ab_036, Ab_043, Ab_044, Ab_045, Ab_046, Ab_050, Ab_051, Ab_058, Ab_063, Ab_159, Ab_064, Ab_065, Ab_066, Ab_067, Ab_068, Ab_069, Ab_155, Ab_070, Ab_071, Ab_149, Ab_072, Ab_073, Ab_074, Ab_078, Ab_079, Ab_080, Ab_083, Ab_153, or Ab_087. In some cases, the heavy chain comprises a VH with an amino acid sequence comprising the amino acid sequence of the VH of Ab_001, Ab_006, Ab_008, Ab_009, Ab_010, Ab_011, Ab_012, Ab_013, Ab_025, Ab_026, Ab_027, Ab_028, Ab_029, Ab_030, Ab_031, Ab_034, Ab_035, Ab_036, Ab_043, Ab_044, Ab_045, Ab_046, Ab_050, Ab_051, Ab_058, Ab_063, Ab_159, Ab_064, Ab_065, Ab_066, Ab_067, Ab_068, Ab_069, Ab_155, Ab_070, Ab_071, Ab_149, Ab_072, Ab_073, Ab_074, Ab_078, Ab_079, Ab_080, Ab_083, Ab_153, or Ab_087, and/or the light chain comprises a VL with an amino acid sequence comprising the amino acid sequence of the VL of Ab_001, Ab_006, Ab_008, Ab_009, Ab_010, Ab_011, Ab_012, Ab_013, Ab_025, Ab_026, Ab_027, Ab_028, Ab_029, Ab_030, Ab_031, Ab_034, Ab_035, Ab_036, Ab_043, Ab_044, Ab_045, Ab_046, Ab_050, Ab_051, Ab_058, Ab_063, Ab_159, Ab_064, Ab_065, Ab_066, Ab_067, Ab_068, Ab_069, Ab_155, Ab_070, Ab_071, Ab_149, Ab_072, Ab_073, Ab_074, Ab_078, Ab_079, Ab_080, Ab_083, Ab_153, or Ab_087.

[0012] In further embodiments, the antibody comprises: (a) a heavy chain constant domain selected from (1) a human IgM constant domain; (2) a human IgGI constant domain; (3) a human IgG2 constant domain; (4) a human IgG3 constant domain; (5) a human IgG4 constant domain; or (6) a human IgA constant domain; (b) a light chain constant domain selected from (1) a Ig kappa constant domain or (2) a human Ig lambda constant domain; or any combination of (a) or (b). In other embodiments, the antibody is a fully human antibody, a humanized antibody, a chimeric antibody, a whole antibody, a single chain (scFv) antibody, a monoclonal antibody, Fab fragment, a Fab′ fragment, a F(ab′)2, a Fv, a disulfide linked F, and/or a bispecific antibody. Thus, in some cases, the antibody comprises a full length heavy chain constant region and/or a full length light chain constant region. In other cases, the antibody is a Fab fragment, a Fab′ fragment, a F(ab′)2 fragment, a Fv fragment, a disulfide linked F fragment, or a scFv fragment.

[0013] In some cases, the antibody: (a) blocks the binding of human BTLA to human HVEM with an IC50 of 10 nM or less, 3 nM or less, or 2 nM or less; (b) blocks the binding of human LIGHT to human HVEM with an IC50 of 30 nM or less, 20 nM or less, or 10 nM or less; (c) blocks the binding of human BTLA to human HVEM with an IC50 of 10 nM or less, 3 nM or less, or 2 nM or less, and also blocks the binding of human LIGHT to human HVEM; or (d) blocks the binding of human LIGHT to human HVEM with an IC50 of 30 nM or less, 20 nM or less, or 10 nM or less, and also blocks the binding of human BTLA to human HVEM. In some cases, the antibody binds to human HVEM with a K_{D} of 50 nM or less, or 10 nM or less. In some cases, the antibody binds to cynomolgus monkey HVEM with a K_{D} of 50 nM or less, or 10 nM or less.

[0014] In some cases, the antibody is bispecific or multispecific. For example, in some embodiments, a bispecific antibody is selected from: a bispecific T-cell engager (BiTE) antibody, a dual-affinity retargeting molecule (DART), a CrossMAb antibody, a DutaMab™ antibody, a DuoBody antibody; a Triomab, a TandAb, a bispecific NanoBody, Tandem scFv, a diabody, a single chain diabody, a HSA body, a (scFv)2 HSA Antibody, an scFv-IgG antibody, a Dock and Lock bispecific antibody, a DVD-IgG antibody, a TBTI DVD-IgG, an IgG-fynomer, a Tetravalent bispecific tandem IgG antibody, a dual-targeting domain antibody, a chemically linked bispecific (Fab′)2 molecule, a crosslinked mAb, a Dual-action Fab IgG (DAF-IgG), an orthoFab-IgG, a bispecific CovX-Body, a bispecific hexavalent trimerbody, 2 scFv linked to diphtheria toxin, and an ART-Ig.

[0015] In further embodiments, the bispecific antibody comprises (a) an anti-CXCL12 antibody; (b) an anti-CXCR4 antibody; (c) an anti-CD47 antibody; (d) a checkpoint inhibitor antibody, preferably an anti-PD-1 antibody, an anti-PD-L1 antibody, an anti-CTLA-4 antibody, an anti-TIM-3 antibody, and/or an anti-LAG3 antibody, (e) an anti-T-cell co-receptor antibody (e.g., an anti-4-1BB (CD137) antibody or an anti-ICOS (CD278) antibody); and/or (f) an anti-neoantigen antibody.

[0016] In some embodiments, the neoantigen is selected from: MAGE-A1, MAGE-A2, MAGE-A3, MAGE-A4, MAGE-A5, MAGE-A6, MAGE-A7, MAGE-A8, MAGE-A9, MAGE-A10, MAGE-A11, MAGE-A12, GAGE-1, GAGE-2, GAGE-3, GAGE-4, GAGE-5, GAGE-6, GAGE-7, GAGE-8, BAGE-1, RAGE-1, LB33/MUM-1, PRAME, NAG, MAGE-Xp2 (MAGE-B2), MAGE-Xp3 (MAGE-B3), MAGE-Xp4 (MAGE-B4), MAGE-C1/CT7, MAGE-C2, NY-ESO-I, LAGE-1, SSX-I, SSX-2(HOM-MEL-40), SSX-3, SSX-4, SSX-5, SCP-1 and XAGE, melanocyte differentiation antigens, p53, ras, CEA, MUC1, PMSA, PSA, tyrosinase, Melan-A, MART-1, gp100, gp75, alpha-actinin-4, Bcr-Abl fusion protein, Casp-8, beta-catenin, cdc27, cdk4, cdkn2a, coa-1, dek-can fusion protein, EF2, ETV6-AML1 fusion protein, LDLR-fucosyltransferaseAS fusion protein, HLA-A2, HLA-A11, hsp70-2, KIAA0205, Mart2, Mum-2, and 3, neo-PAP, myosin class I, OS-9, pml-RAR alpha fusion protein, PTPRK, K-ras, N-ras, Triosephosphate isomerase, GnTV, Herv-K-mel, NA-88, SP17, and TRP2-Int2, (MART-1), E2A-PRL, H4-RET, IGH-IGK, MYL-RAR, Epstein Barr virus antigens, EBNA, human papillomavirus (HPV) antigens E6 and E7, TSP-180, MAGE-4, MAGE-5, MAGE-6, p185erbB2, p180erbB-3, c-met, nm-23H1, PSA, TAG-72-4, CA 19-9, CA 72-4, CAM 17.1, NuMa, K-ras, alpha.-fetoprotein, 13HCG, BCA225, BTAA, CA 125, CA 15-3 (CA 27.29BCAA), CA 195, CA 242, CA-50, CAM43, CD68\KP1, CO-029, FGF-5, G250, Ga733 (EpCAM), HTgp-175, M344, MA-50, MG7-Ag, MOV18, NB\170K, NY-CO-1, RCAS1, SDCCAG16, TA-90 (Mac-2 binding proteincyclophilin C-associated protein), TAAL6, TAG72, TLP, TPS, tyrosinase related proteins, TRP-1, TRP-2, or mesothelin.

[0017] In other embodiments, the antibody further comprises: (a) a detectable label, preferably wherein said detectable label is a radiolabel, an enzyme, a fluorescent label, a luminescent label, or a bioluminescent label; or (b) a conjugated therapeutic or cytotoxic agent.

[0018] In some embodiments, the detectable label is selected from ¹²⁵I, ¹³¹I, In, ⁹⁰Y, ⁹⁹Tc, ¹⁷⁷Lu, ¹⁶⁶Ho, or ¹⁵³Sm, or a biotinylated molecule. In other embodiments, the conjugated therapeutic or cytotoxic agent is selected from (a) an anti-metabolite; (b) an alkylating agent; (c) an antibiotic; (d) a growth factor; (e) a cytokine; (f) an anti-angiogenic agent; (g) an anti-mitotic agent; (h) an anthracycline; (i) toxin; and/or (j) an apoptotic agent.

[0019] Also provided are pharmaceutical compositions comprising antibodies herein and a pharmaceutically acceptable carrier and/or excipient, as well as kits comprising antibodies herein and/or nucleic acids encoding the anti-HVEM antibodies as described herein. Additionally, vectors and host cells comprising such nucleic acid molecules are also provided.

[0020] Uses of the anti-HVEM antibodies are also provided, including uses selected from (a) a method of detecting aberrant expression of the HVEM protein; (b) a method for diagnosing a disease or disorder associated with aberrant HVEM protein expression or activity; (c) a method of inhibiting HVEM activity; (d) a method of increasing HVEM activity; (e) a method of inhibiting HVEM binding to BTLA and/or LIGHT and/or (f) a method of treating a disease or disorder associated with aberrant HVEM expression or activity.

[0021] In some embodiments, uses of the anti-HVEM antibodies can be used to treat HIV infection; cancer, preferably, wherein the cancer is an adenocarcinoma, sarcoma, skin cancer, melanoma, bladder cancer, brain cancer, breast cancer, uterus cancer, ovarian cancer, prostate cancer, lung cancer, colorectal cancer, cervical cancer, liver cancer, head and neck cancer, esophageal cancer, pancreas cancer, pancreatic ductal adenocarcinoma (PDA), renal cancer, stomach cancer, multiple myeloma or cerebral cancer. In treating cancer, the use further comprises co-administering other anti-cancer therapies, such as a chemotherapeutic agent, radiation therapy, a cancer therapy, an immunotherapy, or a cancer vaccine, a cytokine, a toxin, a pro-apoptotic protein or a chemotherapeutic agent.

[0022] In some embodiments, the cancer vaccine recognizes one or more tumor antigens expressed on cancer cells, preferably, wherein the tumor antigen is selected from MAGE-A1, MAGE-A2, MAGE-A3, MAGE-A4, MAGE-A5, MAGE-A6, MAGE-A7, MAGE-A8, MAGE-A9, MAGE-A10, MAGE-A11, MAGE-A12, GAGE-1, GAGE-2, GAGE-3, GAGE-4, GAGE-5, GAGE-6, GAGE-7, GAGE-8, BAGE-1, RAGE-1, LB33/MUM-1, PRAME, NAG, MAGE-Xp2 (MAGE-B2), MAGE-Xp3 (MAGE-B3), MAGE-Xp4 (MAGE-B4), MAGE-C1/CT7, MAGE-C2, NY-ESO-I, LAGE-1, SSX-I, SSX-2(HOM-MEL-40), SSX-3, SSX-4, SSX-5, SCP-I and XAGE, melanocyte differentiation antigens, p53, ras, CEA, MUC1, PMSA, PSA, tyrosinase, Melan-A, MART-1, gp100, gp75, alpha-actinin-4, Bcr-Abl fusion protein, Casp-8, beta-catenin, cdc27, cdk4, cdkn2a, coa-1, dek-can fusion protein, EF2, ETV6-AML1 fusion protein, LDLR-fucosyltransferaseAS fusion protein, HLA-A2, HLA-A11, hsp70-2, KIAA0205, Mart2, Mum-2, and 3, neo-PAP, myosin class I, OS-9, pml-RAR alpha fusion protein, PTPRK, K-ras, N-ras, Triosephosphate isomerase, GnTV, Herv-K-mel, NA-88, SP17, and TRP2-Int2, (MART-1), E2A-PRL, H4-RET, IGH-IGK, MYL-RAR, Epstein Barr virus antigens, EBNA, human papillomavirus (HPV) antigens E6 and E7, TSP-180, MAGE-4, MAGE-5, MAGE-6, p185erbB2, p180erbB-3, c-met, nm-23H1, PSA, TAG-72-4, CA 19-9, CA 72-4, CAM 17.1, NuMa, K-ras, alpha.-fetoprotein, 13HCG, BCA225, BTAA, CA 125, CA 15-3 (CA 27.29BCAA), CA 195, CA 242, CA-50, CAM43, CD68\KP1, CO-029, FGF-5, G250, Ga733 (EpCAM), HTgp-175, M344, MA-50, MG7-Ag, MOV18, NB\170K, NY-CO-1, RCAS1, SDCCAG16, TA-90 (Mac-2 binding protein\cyclophilin C-associated protein), TAAL6, TAG72, TLP, TPS, tyrosinase related proteins, TRP-1, TRP-2, or mesothelin.

[0023] In other embodiments, the anti-cancer therapy is selected from: aspirin, sulindac, curcumin, alkylating agents including: nitrogen mustards, such as mechlor-ethamine, cyclophosphamide, ifosfamide, melphalan and chlorambucil; nitrosoureas, such as carmustine (BCNU), lomustine (CCNU), and semustine (methyl-CCNU); thylenimines/methylmelamine such as thriethylenemelamine (TEM), triethylene, thiophosphoramide (thiotepa), hexamethylmelamine (HMM, altretamine); alkyl sulfonates such as busulfan; triazines such as dacarbazine (DTIC); antimetabolites including folic acid analogs such as methotrexate and trimetrexate, pyrimidine analogs such as 5-fluorouracil, fluorodeoxyuridine, gemcitabine, cytosine arabinoside (AraC, cytarabine), 5-azacytidine, 2,2′-difluorodeoxycytidine, purine analogs such as 6-mercaptopurine, 6-thioguanine, azathioprine, 2′-deoxycoformycin (pentostatin), erythrohydroxynonyladenine (EHNA), fludarabine phosphate, and 2-chlorodeoxyadenosine (cladribine, 2-CdA); natural products including antimitotic drugs such as paclitaxel, vinca alkaloids including vinblastine (VLB), vincristine, and vinorelbine, taxotere, estramustine, and estramustine phosphate; epipodophylotoxins such as etoposide and teniposide; antibiotics, such as actimomycin D, daunomycin (rubidomycin), doxorubicin, mitoxantrone, idarubicin, bleomycins, plicamycin (mithramycin), mitomycinC, and actinomycin; enzymes such as L-asparaginase, cytokines such as interferon (IFN)-gamma, tumor necrosis factor (TNF)-alpha, TNF-beta and GM-CSF, anti-angiogenic factors, such as angiostatin and endostatin, inhibitors of FGF or VEGF such as soluble forms of receptors for angiogenic factors, including soluble VGFNEGF receptors, platinum coordination complexes such as cisplatin and carboplatin, anthracenediones such as mitoxantrone, substituted urea such as hydroxyurea, methylhydrazine derivatives including N-methylhydrazine (MIH) and procarbazine, adrenocortical suppressants such as mitotane (o,p′-DDD) and aminoglutethimide; hormones and antagonists including adrenocorticosteroid antagonists such as prednisone and equivalents, dexamethasone and aminoglutethimide; progestin such as hydroxyprogesterone caproate, medroxyprogesterone acetate and megestrol acetate; estrogen such as diethylstilbestrol and ethinyl estradiol equivalents; antiestrogen such as tamoxifen; androgens including testosterone propionate and fluoxymesterone/equivalents; antiandrogens such as flutamide, gonadotropin-releasing hormone analogs and leuprolide; non-steroidal antiandrogens such as flutamide; kinase inhibitors, histone deacetylase inhibitors, methylation inhibitors, proteasome inhibitors, monoclonal antibodies, oxidants, anti-oxidants, telomerase inhibitors, BH3 mimetics, ubiquitin ligase inhibitors, stat inhibitors and receptor tyrosin kinase inhibitors such as imatinib mesylate (marketed as Gleevac or Glivac) and erlotinib (an EGF receptor inhibitor) now marketed as Tarveca; and anti-virals such as oseltamivir phosphate, Amphotericin B, and palivizumab.

[0024] In other embodiments, the anti-HVEM antibody is co-administered with a molecule selected from (a) an anti-CXCL12 antibody; (b) an anti-CXCR4 antibody; (c) an anti-CD47 antibody; (d) a checkpoint inhibitor antibody, preferably an anti-PD-1 antibody, an anti-PD-L1 antibody, an anti-CTLA-4 antibody, an anti-TIM-3 antibody, and/or an anti-LAG3 antibody, (e) an anti-T-cell co-receptor antibody (e.g., an anti-4-1BB (CD137) antibody or an anti-ICOS (CD278) antibody); (f) an anti-neoantigen antibody.

[0025] In such embodiments, the neoantigen is preferably selected from MAGE-A1, MAGE-A2, MAGE-A3, MAGE-A4, MAGE-A5, MAGE-A6, MAGE-A7, MAGE-A8, MAGE-A9, MAGE-A10, MAGE-A11, MAGE-A12, GAGE-1, GAGE-2, GAGE-3, GAGE-4, GAGE-5, GAGE-6, GAGE-7, GAGE-8, BAGE-1, RAGE-1, LB33/MUM-1, PRAME, NAG, MAGE-Xp2 (MAGE-B2), MAGE-Xp3 (MAGE-B3), MAGE-Xp4 (MAGE-B4), MAGE-C1/CT7, MAGE-C2, NY-ESO-1, LAGE-1, SSX-I, SSX-2(HOM-MEL-40), SSX-3, SSX-4, SSX-5, SCP-1 and XAGE, melanocyte differentiation antigens, p53, ras, CEA, MUC1, PMSA, PSA, tyrosinase, Melan-A, MART-1, gp100, gp75, alpha-actinin-4, Bcr-Abl fusion protein, Casp-8, beta-catenin, cdc27, cdk4, cdkn2a, coa-1, dek-can fusion protein, EF2, ETV6-AML1 fusion protein, LDLR-fucosyltransferaseAS fusion protein, HLA-A2, HLA-A11, hsp70-2, KIAA0205, Mart2, Mum-2, and 3, neo-PAP, myosin class I, OS-9, pml-RAR alpha fusion protein, PTPRK, K-ras, N-ras, Triosephosphate isomerase, GnTV, Herv-K-mel, NA-88, SP17, and TRP2-Int2, (MART-1), E2A-PRL, H4-RET, IGH-IGK, MYL-RAR, Epstein Barr virus antigens, EBNA, human papillomavirus (HPV) antigens E6 and E7, TSP-180, MAGE-4, MAGE-5, MAGE-6, p185erbB2, p180erbB-3, c-met, nm-23H1, PSA, TAG-72-4, CA 19-9, CA 72-4, CAM 17.1, NuMa, K-ras, alpha.-fetoprotein, 13HCG, BCA225, BTAA, CA 125, CA 15-3 (CA 27.29BCAA), CA 195, CA 242, CA-50, CAM43, CD68\KP1, CO-029, FGF-5, G250, Ga733 (EpCAM), HTgp-175, M344, MA-50, MG7-Ag, MOV18, NB\170K, NY-CO-1, RCAS1, SDCCAG16, TA-90 (Mac-2 binding protein\cyclophilin C-associated protein), TAAL6, TAG72, TLP, TPS, tyrosinase related proteins, TRP-1, TRP-2, or mesothelin.

[0026] In some embodiments, co-administration can occur simultaneously, separately, or sequentially with the antibody.

[0027] The disclosure herein also encompasses methods of detecting HVEM in vitro in a sample, comprising contacting the sample with the antibody.

[0028] These and other aspects, objects and features are described in more detail below.

### BRIEF DESCRIPTION OF THE FIGURES

[0029] The objects and features of the invention can be better understood with reference to the following detailed description and accompanying drawings.

[0030] FIG. 1 illustrates the antibody discovery and lead confirmation workflow used to generate the anti-HVEM antibodies as described herein.

[0031] FIG. 2 summarizes the screening results obtained after following the work-flow described in FIG. 1.

[0032] FIGS. 3a and 3b show intensities from ELISA screens for binding of anti-HVEM antibodies to HVEM, as further described in the Examples.

### DETAILED DESCRIPTION

[0033] The invention is directed to specific anti-HVEM antibodies, related compositions, and their use.

### Definitions

[0034] The following definitions are provided for specific terms which are used in the following written description.

[0035] As used in the specification and claims, the singular form “a”, “an” and “the” include plural references unless the context clearly dictates otherwise. For example, the term “a cell” includes a plurality of cells, including mixtures thereof. The term “a nucleic acid molecule” includes a plurality of nucleic acid molecules.

[0036] As used herein, the term “comprising” is intended to mean that the HVEM antibodies and methods include the recited elements, but do not exclude other elements. “Consisting essentially of”, when used to define HVEM antibodies and methods, shall mean excluding other elements of any essential significance to the combination. Thus, an anti-HVEM antibody consisting essentially of the elements as defined herein would not exclude trace contaminants from the isolation and purification method and pharmaceutically acceptable carriers, such as phosphate buffered saline, preservatives, and the like. “Consisting of” shall mean excluding more than trace elements of other ingredients and substantial method steps for administering the HVEM antibody of this invention. Embodiments defined by each of these transition terms are within the scope of this invention.

[0037] The term “about” or “approximately” means within an acceptable range for the particular value as determined by one of ordinary skill in the art, which will depend in part on how the value is measured or determined, e.g., the limitations of the measurement system. For example, “about” can mean a range of up to 20%, preferably up to 10%, more preferably up to 5%, and more preferably still up to 1% of a given value. Alternatively, particularly with respect to biological systems or processes, the term can mean within an order of magnitude, preferably within 5 fold, and more preferably within 2 fold, of a value. Unless otherwise stated, the term ‘about’ means within an acceptable error range for the particular value, such as ±1-20%, preferably ±1-10% and more preferably ±1-5%.

[0038] Where a range of values is provided, it is understood that each intervening value, between the upper and lower limit of that range and any other stated or intervening value in that stated range is encompassed within the invention. The upper and lower limits of these smaller ranges may independently be included in the smaller ranges, and are also encompassed within the invention, subject to any specifically excluded limit in the stated range. Where the stated range includes one or both of the limits, ranges excluding either both of those included limits are also included in the invention.

[0039] As used herein, the terms “polynucleotide” and “nucleic acid molecule” are used interchangeably to refer to polymeric forms of nucleotides of any length. The polynucleotides may contain deoxyribonucleotides, ribonucleotides, and/or their analogs. Nucleotides may have any three-dimensional structure, and may perform any function, known or unknown. The term “polynucleotide” includes, for example, single-double-stranded and triple helical molecules, a gene or gene fragment, exons, introns, mRNA, tRNA, rRNA, ribozymes, antisense molecules, cDNA, recombinant polynucleotides, branched polynucleotides, aptamers, plasmids, vectors, isolated DNA of any sequence, isolated RNA of any sequence, nucleic acid probes, and primers. A nucleic acid molecule may also comprise modified nucleic acid molecules (e.g., comprising modified bases, sugars, and/or internucleotide linkers).

[0040] As used herein, the term “peptide” refers to a compound of two or more subunit amino acids, amino acid analogs, or peptidomimetics. The subunits may be linked by peptide bonds or by other bonds (e.g., as esters, ethers, and the like).

[0041] As used herein, the term “amino acid” refers to either natural and/or unnatural or synthetic amino acids, including glycine and both D or L optical isomers, and amino acid analogs and peptidomimetics. A peptide of three or more amino acids is commonly called an oligopeptide if the peptide chain is short. If the peptide chain is long (e.g., greater than about 10 amino acids), the peptide is commonly called a polypeptide or a protein. While the term “protein” encompasses the term “polypeptide”, a “polypeptide” may be a less than full-length protein.

[0042] As used herein a “LAMP polypeptide” or “LAMP” refers to the mammalian lysosomal associated membrane proteins human LAMP-1, human LAMP-2, human LAMP-3, human LIMP-2, human Endolyn, human LIMBIC, human LAMP-5, or human Macrosailin as described herein, as well as orthologs, and allelic variants.

[0043] As used herein, a “LAMP Construct” is defined as those constructs described in U.S. Ser. No. 16/607,082 filed on Oct. 21, 2019 and is hereby incorporated by reference in its entirety. In preferred embodiments, the LAMP Construct used to generate the anti-HVEM antibodies is ILC-4 as described in this document.

[0044] The HVEM, BTLA, and LIGHT proteins referenced herein refer to the human proteins unless specifically noted otherwise herein (e.g., cynomolgus monkey HVEM and the like).

[0045] As used herein, “expression” refers to the process by which polynucleotides are transcribed into mRNA and/or translated into peptides, polypeptides, or proteins. If the polynucleotide is derived from genomic DNA, expression may include splicing of the mRNA transcribed from the genomic DNA.

[0046] As used herein, “under transcriptional control” or “operably linked” refers to expression (e.g., transcription or translation) of a polynucleotide sequence which is controlled by an appropriate juxtaposition of an expression control element and a coding sequence. In one aspect, a DNA sequence is “operatively linked” to an expression control sequence when the expression control sequence controls and regulates the transcription of that DNA sequence.

[0047] As used herein, “coding sequence” is a sequence which is transcribed and translated into a polypeptide when placed under the control of appropriate expression control sequences. The boundaries of a coding sequence are determined by a start codon at the 5′ (amino) terminus and a translation stop codon at the 3′ (carboxyl) terminus. A coding sequence can include, but is not limited to, a prokaryotic sequence, cDNA from eukaryotic mRNA, a genomic DNA sequence from eukaryotic (e.g., mammalian) DNA, and even synthetic DNA sequences. A polyadenylation signal and transcription termination sequence will usually be located 3′ to the coding sequence.

[0048] As used herein, two coding sequences “correspond” to each other if the sequences or their complementary sequences encode the same amino acid sequences.

[0049] As used herein, “signal sequence” denotes the endoplasmic reticulum translocation sequence. This sequence encodes a signal peptide that communicates to a cell to direct a polypeptide to which it is linked (e.g., via a chemical bond) to an endoplasmic reticulum vesicular compartment, to enter an exocytic/endocytic organelle, to be delivered either to a cellular vesicular compartment, the cell surface or to secrete the polypeptide. This signal sequence is sometimes clipped off by the cell in the maturation of a protein. Signal sequences can be found associated with a variety of proteins native to prokaryotes and eukaryotes.

[0050] As used herein, the phrase “prime boost” describes an immunization scheme where an animal is exposed to an antigen and then reexposed to the same or different antigen in order to “boost” the immune system. For example, the use of a LAMP Construct comprising a HVEM antigen could be used to prime a T-cell response followed by the use of a second LAMP Construct comprising a second HVEM antigen, or a DNA vaccine comprising a HVEM antigen or a recombinant HVEM antigen to boost the response. These heterologous prime-boost immunizations elicit immune responses of greater height and breadth than can be achieved by priming and boosting with the same antigen. The priming with a LAMP Construct comprising a HVEM antigen initiates memory cells; the boost step expands the memory response. Preferably, use of the two different agents do not raise responses against each other and thus do not interfere with each other's activity. Mixtures of HVEM antigens are specifically contemplated in the prime and/or boost step. Boosting can occur one or multiple times.

[0051] As used herein, “hybridization” refers to a reaction in which one or more polynucleotides react to form a complex that is stabilized via hydrogen bonding between the bases of the nucleotide residues. The hydrogen bonding may occur by Watson-Crick base pairing, Hoogstein binding, or in any other sequence-specific manner. The complex may comprise two strands forming a duplex structure, three or more strands forming a multi-stranded complex, a single self-hybridizing strand, or any combination of these. A hybridization reaction may constitute a step in a more extensive process, such as the initiation of a PCR reaction, or the enzymatic cleavage of a polynucleotide by a ribozyme.

[0052] As used herein, a polynucleotide or polynucleotide region (or a polypeptide or polypeptide region) which has a certain percentage (for example, at least about 50%, at least about 60%, at least about 70%, at least about 80%, at least about 85%, at least about 90%, at least about 95%, at least about 99%) of “sequence identity” to another sequence means that, when maximally aligned, using software programs routine in the art, that percentage of bases (or amino acids) are the same in comparing the two sequences.

[0053] Two sequences are “substantially homologous” or “substantially similar” when at least about 50%, at least about 60%, at least about 70%, at least about 75%, and preferably at least about 80%, and most preferably at least about 90 or 95% of the nucleotides match over the defined length of the DNA sequences. Similarly, two polypeptide sequences are “substantially homologous” or “substantially similar” when at least about 50%, at least about 60%, at least about 66%, at least about 70%, at least about 75%, and preferably at least about 80%, and most preferably at least about 90 or 95% of the amino acid residues of the polypeptide match over a defined length of the polypeptide sequence. Sequences that are substantially homologous can be identified by comparing the sequences using standard software available in sequence data banks. Substantially homologous nucleic acid sequences also can be identified in a Southern hybridization experiment under, for example, stringent conditions as defined for that particular system. Defining appropriate hybridization conditions is within the skill of the art. For example, stringent conditions can be: hybridization at 5×SSC and 50% formamide at 42° C., and washing at 0.1×SSC and 0.1% sodium dodecyl sulfate at 60° C. Further examples of stringent hybridization conditions include: incubation temperatures of about 25 degrees C. to about 37 degrees C.; hybridization buffer concentrations of about 6×SSC to about 10×SSC; formamide concentrations of about 0% to about 25%; and wash solutions of about 6×SSC. Examples of moderate hybridization conditions include: incubation temperatures of about 40 degrees C. to about 50 degrees C.; buffer concentrations of about 9×SSC to about 2×SSC; formamide concentrations of about 30% to about 50%; and wash solutions of about 5×SSC to about 2×SSC. Examples of high stringency conditions include: incubation temperatures of about 55 degrees C. to about 68 degrees C.; buffer concentrations of about 1×SSC to about 0.1×SSC; formamide concentrations of about 55% to about 75%; and wash solutions of about 1×SSC, 0.1×SSC, or deionized water. In general, hybridization incubation times are from 5 minutes to 24 hours, with 1, 2, or more washing steps, and wash incubation times are about 1, 2, or 15 minutes. SSC is 0.15 M NaCl and 15 mM citrate buffer. It is understood that equivalents of SSC using other buffer systems can be employed. Similarity can be verified by sequencing, but preferably, is also or alternatively, verified by function (e.g., ability to traffic to an endosomal compartment, and the like), using assays suitable for the particular domain in question.

[0054] The terms “percent (%) sequence similarity”, “percent (%) sequence identity”, and the like, generally refer to the degree of identity or correspondence between different nucleotide sequences of nucleic acid molecules or amino acid sequences of polypeptides that may or may not share a common evolutionary origin (see Reeck et al., supra). Sequence identity can be determined using any of a number of publicly available sequence comparison algorithms, such as BLAST, FASTA, DNA Strider, GCG (Genetics Computer Group, Program Manual for the GCG Package, Version 7, Madison, Wisconsin), etc.

[0055] To determine the percent identity between two amino acid sequences or two nucleic acid molecules, the sequences are aligned for optimal comparison purposes. The percent identity between the two sequences is a function of the number of identical positions shared by the sequences (i.e., percent identity=number of identical positions/total number of positions (e.g., overlapping positions)×100). In one embodiment, the two sequences are, or are about, of the same length. The percent identity between two sequences can be determined using techniques similar to those described below, with or without allowing gaps. In calculating percent sequence identity, typically exact matches are counted.

[0056] The determination of percent identity between two sequences can be accomplished using a mathematical algorithm. A non-limiting example of a mathematical algorithm utilized for the comparison of two sequences is the algorithm of Karlin and Altschul, Proc. Natl. Acad. Sci. USA 1990, 87:2264, modified as in Karlin and Altschul, Proc. Natl. Acad. Sci. USA 1993, 90:5873-5877. Such an algorithm is incorporated into the NBLAST and XBLAST programs of Altschul et al, J. Mol. Biol. 1990; 215: 403. BLAST nucleotide searches can be performed with the NBLAST program, score=100, wordlength=12, to obtain nucleotide sequences homologous to sequences of the invention. BLAST protein searches can be performed with the XBLAST program, score=50, wordlength=3, to obtain amino acid sequences homologous to protein sequences of the invention. To obtain gapped alignments for comparison purposes, Gapped BLAST can be utilized as described in Altschul et al, Nucleic Acids Res. 1997, 25:3389. Alternatively, PSI-Blast can be used to perform an iterated search that detects distant relationship between molecules. See Altschul et al. (1997) supra. When utilizing BLAST, Gapped BLAST, and PSI-Blast programs, the default parameters of the respective programs (e.g., XBLAST and NBLAST) can be used. See ncbi.nlm.nih.gov/BLAST/on the WorldWideWeb.

[0057] Another non-limiting example of a mathematical algorithm utilized for the comparison of sequences is the algorithm of Myers and Miller, CABIOS 1988; 4: 11-17. Such an algorithm is incorporated into the ALIGN program (version 2.0), which is part of the GCG sequence alignment software package. When utilizing the ALIGN program for comparing amino acid sequences, a PAM120 weight residue table, a gap length penalty of 12, and a gap penalty of 4 can be used.

[0058] In a preferred embodiment, the percent identity between two amino acid sequences is determined using the algorithm of Needleman and Wunsch (J. Mol. Biol. 1970, 48:444-453), which has been incorporated into the GAP program in the GCG software package (Accelrys, Burlington, MA; available at accelrys.com on the WorldWideWeb), using either a Blossum 62 matrix or a PAM250 matrix, a gap weight of 16, 14, 12, 10, 8, 6, or 4, and a length weight of 1, 2, 3, 4, 5, or 6. In yet another preferred embodiment, the percent identity between two nucleotide sequences is determined using the GAP program in the GCG software package using a NWSgapdna.CMP matrix, a gap weight of 40, 50, 60, 70, or 80, and a length weight of 1, 2, 3, 4, 5, or 6. A particularly preferred set of parameters (and the one that can be used if the practitioner is uncertain about what parameters should be applied to determine if a molecule is a sequence identity or homology limitation of the invention) is using a Blossum 62 scoring matrix with a gap open penalty of 12, a gap extend penalty of 4, and a frameshift gap penalty of 5.

[0059] Another non-limiting example of how percent identity can be determined is by using software programs such as those described in Current Protocols In Molecular Biology (F. M. Ausubel et al., eds., 1987) Supplement 30, section 7.7.18, Table 7.7.1. Preferably, default parameters are used for alignment. A preferred alignment program is BLAST, using default parameters. In particular, preferred programs are BLASTN and BLASTP, using the following default parameters: Genetic code=standard; filter=none; strand=both; cutoff=60; expect=10; Matrix=BLOSUM62; Descriptions=50 sequences; sort by=HIGH SCORE; Databases=non-redundant, GenBank+EMBL+DDBJ+PDB+GenBank CDS translations+SwissProtein+SPupdate+PIR. Details of these programs can be found at the following Internet address: http://www.ncbi.nlm.nih.gov/cgi-bin/BLAST.

[0060] Statistical analysis of the properties described herein may be carried out by standard tests, for example, t-tests, ANOVA, or Chi squared tests. Typically, statistical significance will be measured to a level of p=0.05 (5%), more preferably p=0.01, p=0.001, p=0.0001, p=0.000001

[0061] “Conservatively modified variants” of domain sequences also can be provided. With respect to particular nucleic acid sequences, conservatively modified variants refer to those nucleic acids which encode identical or essentially identical amino acid sequences, or where the nucleic acid does not encode an amino acid sequence, to essentially identical sequences. Specifically, degenerate codon substitutions can be achieved by generating sequences in which the third position of one or more selected (or all) codons is substituted with mixed-base and/or deoxyinosine residues (Batzer, et al., 1991, Nucleic Acid Res. 19: 5081; Ohtsuka, et al., 1985, J. Biol. Chem. 260: 2605-2608; Rossolini et al., 1994, Mol. Cell. Probes 8: 91-98).

[0062] The term “variant” as used herein refers to a polypeptide that possesses a similar or identical function as an anti-HVEM antibody, but does not necessarily comprise a similar or identical amino acid sequence of an anti-HVEM antibody or possess a similar or identical structure of an anti-HVEM antibody. A variant having a similar amino acid refers to a polypeptide that satisfies at least one of the following: (a) a polypeptide comprising, or alternatively consisting of, an amino acid sequence that is at least 30%, at least 35%, at least 40%, at least 45%, at least 50%, at least 55%, at least 60%, at least 65%, at least 70%, at least 75%, at least 80%, at least 85%, at least 90%, at least 95% or at least 99% identical to the amino acid sequence of an anti-HVEM antibody (including a VH domain, CDRH, VL domain, or CDRL) having an amino acid sequence of any one of those referred to in Tables 1-3); (b) a polypeptide encoded by a nucleotide sequence, the complementary sequence of which hybridizes under stringent conditions to a nucleotide sequence encoding an anti-HVEM antibody (including a VH domain, CDRH, VL domain, or CDRL) having an amino acid sequence of any one of those referred to in Tables 1-3); and (c) a polypeptide encoded by a nucleotide sequence that is at least 30%, at least 35%, at least 40%, at least 45%, at least 50%, at least 55%, at least 60%, at least 65%, at least 70%, at least 75%, at least 80%, at least 85%, at least 90%, at least 95% or at least 99%, identical to the nucleotide sequence encoding anti-HVEM antibody (including a VH domain, CDRH, VL domain, or CDRL) having an amino acid sequence of any one of those referred to in Tables 1-3) A polypeptide with similar structure to an anti-HVEM antibody or antibody fragment thereof, described herein refers to a polypeptide that has a similar secondary, tertiary or quarternary structure of an anti-HVEM antibody or antibody fragment thereof as described herein. The structure of a polypeptide can be determined by methods known to those skilled in the art, including but not limited to, X-ray crystallography, nuclear magnetic resonance, and crystallographic electron microscopy.

[0063] The term “biologically active fragment”, “biologically active form”, “biologically active equivalent” of and “functional derivative” of a wild-type protein, possesses a biological activity that is at least substantially equal (e.g., not significantly different from) the biological activity of the wild type protein as measured using an assay suitable for detecting the activity.

[0064] As used herein, the term “isolated” or “purified” means separated (or substantially free) from constituents, cellular and otherwise, in which the polynucleotide, peptide, polypeptide, protein, antibody, or fragments thereof, are normally associated with in nature. For example, isolated polynucleotide is one that is separated from the 5′ and 3′ sequences with which it is normally associated in the chromosome. As is apparent to those of skill in the art, a non-naturally occurring polynucleotide, peptide, polypeptide, protein, antibody, or fragments thereof, does not require “isolation” to distinguish it from its naturally occurring counterpart. By substantially free or substantially purified, it is meant at least 50% of the population, preferably at least 70%, more preferably at least 80%, and even more preferably at least 90%, are free of the components with which they are associated in nature.

[0065] As used herein, a “target cell” or “recipient cell” refers to an individual cell or cell which is desired to be, or has been, a recipient of the polynucleotide described herein. The term is also intended to include progeny of a single cell, and the progeny may not necessarily be completely identical (in morphology or in genomic or total DNA complement) to the original parent cell due to natural, accidental, or deliberate mutation. A target cell may be in contact with other cells (e.g., as in a tissue) or may be found circulating within the body of an organism.

[0066] As used herein, a “non-human vertebrate” is any vertebrate that can be used to generate antibodies. Examples include, but are not limited to, a rat, a mouse, a rabbit, a llama, camels, a cow, a guinea pig, a hamster, a dog, a cat, a horse, a non-human primate, a simian (e.g. a monkey, ape, marmoset, baboon, rhesus macaque), or an ape (e.g. gorilla, chimpanzee, orangutan, gibbon), a chicken. Other classes of non-human vertebrates include murines, simians, farm animals, sport animals, and pets.

[0067] As used herein, the term “pharmaceutically acceptable carrier” encompasses any of the standard pharmaceutical carriers, such as a phosphate buffered saline solution, water, and emulsions, such as an oil/water or water/oil emulsion, and various types of wetting agents. Compositions comprising the anti-HVEM antibodies described herein also can include stabilizers and preservatives. For examples of carriers, stabilizers and adjuvants, see Martin Remington's Pharm. Sci., 15th Ed. (Mack Publ. Co., Easton (1975)).

[0068] A cell has been “transformed”, “transduced”, or “transfected” by the polynucleotide when such nucleic acids have been introduced inside the cell.

[0069] Transforming DNA may or may not be integrated (covalently linked) with chromosomal DNA making up the genome of the cell. In prokaryotes, yeast, and mammalian cells for example, the polynucleotide may be maintained on an episomal element, such as a plasmid. In a eukaryotic cell, a stably transformed cell is one in which the polynucleotides have become integrated into a chromosome so that it is inherited by daughter cells through chromosome replication. This stability is demonstrated by the ability of the eukaryotic cell to establish cell lines or clones comprised of a population of daughter cells containing the polynucleotides. A “clone” is a population of cells derived from a single cell or common ancestor by mitosis. A “cell line” is a clone of a primary cell that is capable of stable growth in vitro for many generations (e.g., at least about 10).

[0070] As used herein, an “effective amount” is an amount sufficient to affect beneficial or desired results, e.g., such as an effective amount of an anti-HVEM antibody or expression of an anti-HVEM antibody to attain a desired therapeutic endpoint. An effective amount can be administered in one or more administrations, applications or dosages. In one aspect, an effective amount of an anti-HVEM antibody is an amount sufficient to treat and/or ameliorate a tumor when injected into a non-human vertebrate.

[0071] The term “treat” or “treatment” other like, as used herein, refers broadly to an improvement or amelioration of a disease or disorder in a subject, such as the improvement or amelioration of at least one symptom or marker associated with the disease or disorder, such as, in the case of a tumor, for example, reduction in the size of the tumor, or a change in biochemical markers associated with the tumor, or reduction in disease symptoms. Treat or treatment also refers to prevention of the onset or slowing of the onset of a disease or disorder, for example.

[0072] An “antigen” refers to the target of an antibody, i.e., the molecule to which the antibody specifically binds. The term “epitope” denotes the site on an antigen, either proteinaceous or non-proteinaceous, to which an antibody binds. Epitopes on a protein can be formed both from contiguous amino acid stretches (linear epitope) or comprise non-contiguous amino acids (conformational epitope), e.g., coming in spatial proximity due to the folding of the antigen, i.e., by the tertiary folding of a proteinaceous antigen. Linear epitopes are typically still bound by an antibody after exposure of the proteinaceous antigen to denaturing agents, whereas conformational epitopes are typically destroyed upon treatment with denaturing agents.

[0073] The term “antibody” herein refers to an immunoglobulin molecule comprising at least complementarity-determining region (CDR) 1, CDR2, and CDR3 of a heavy chain and at least CDR1, CDR2, and CDR3 of a light chain, wherein the molecule is capable of binding to antigen. An “anti-HVEM antibody” or an “HVEM-antibody” or an “antibody that specifically binds to HVEM” or an “antibody that binds to HVEM” and similar phrases refer to an anti-HVEM antibody as described herein.

[0074] The term is used in the broadest sense and encompasses various antibody structures, including but not limited to monoclonal antibodies, polyclonal antibodies, multispecific antibodies (e.g., bispecific antibodies, diabodies, etc.), full length antibodies, single-chain antibodies, antibody conjugates, and antibody fragments, so long as they exhibit the desired HVEM-specific binding activity.

[0075] An “anti-HVEM antibody” is an “antibody” that specifically binds a HVEM antigen and, includes antibodies comprising one or more of the sequences described herein in Tables 1-3. An anti-HVEM antibody specifically excludes antibodies known in the art that are capable of binding HVEM. The term encompasses polyclonal, monoclonal, and chimeric antibodies, including bispecific antibodies. An “antibody combining site” is that structural portion of an antibody molecule comprised of heavy and light chain variable and hypervariable regions that specifically binds a HVEM antigen. Exemplary anti-HVEM antibody molecules are intact immunoglobulin molecules, substantially intact immunoglobulin molecules, and those portions of an immunoglobulin molecule that contains the paratope, including Fab, Fab′, F(ab′)2 and F(v) portions, which portions are preferred for use in the therapeutic methods described herein.

[0076] Thus, the term an anti-HVEM antibody encompasses not only whole antibody molecules, but also antibody fragments as well as variants (including derivatives such as fusion proteins) of anti-HVEM antibodies and antibody fragments. Examples of molecules which are described by the term “anti-HVEM antibody” in this application include, but are not limited to: single chain Fvs (scFvs), Fab fragments, Fab′ fragments, F(ab′)2, disulfide linked Fvs (sdFvs), Fvs, and fragments comprising or alternatively consisting of, either a VL or a VH domain(s). The term “single chain Fv” or “scFv” as used herein refers to a polypeptide comprising a VL domain of an anti-HVEM antibody described in Table 3 linked to a VH domain of an anti-HVEM antibody described in Table 3. Preferred scFV anti-HVEM antibodies comprise the VL and VH domains of the same antibody selected from antibodies identified in column 1 (“AntibodyID”) in Table 1. See Carter (2006) Nature Rev. Immunol. 6:243. It is understood that linkages can vary, so long as the VL and VH domains are linked in a way maintain functionality of the anti-HVEM antibodies.

[0077] Additionally, anti-HVEM antibodies of the invention include, but are not limited to, monoclonal, multi-specific, bi-specific, human, humanized, mouse, or chimeric antibodies, single chain antibodies, camelid antibodies, Fab fragments, F(ab′) fragments, anti-idiotypic (anti-Id) antibodies (including, e.g., anti-Id antibodies to antibodies of the invention), domain antibodies and epitope-binding fragments of any of the above. The immunoglobulin molecules of the invention can be of any type (e.g., IgG, IgE, IgM, IgD, IgA and IgY), class (e.g., IgG1, IgG2, IgG3, IgG4, IgA1 and IgA2) or subclass of immunoglobulin molecule.

[0078] Most preferably, the anti-HVEM antibodies are human antibodies comprising the sequences described in any one of the Tables 2-3. As used herein, “human” antibodies include antibodies having the amino acid sequence of a human immunoglobulin and include antibodies isolated from human immunoglobulin libraries and xenomice or other organisms that have been genetically engineered to produce human antibodies.

[0079] The term “heavy chain” or “HC” refers to a polypeptide comprising at least a heavy chain variable region, with or without a leader sequence. In some embodiments, a heavy chain comprises at least a portion of a heavy chain constant region. The term “full-length heavy chain” refers to a polypeptide comprising a heavy chain variable region and a heavy chain constant region, with or without a leader sequence.

[0080] The term “light chain” or “LC” refers to a polypeptide comprising at least a light chain variable region, with or without a leader sequence. In some embodiments, a light chain comprises at least a portion of a light chain constant region. The term “full-length light chain” refers to a polypeptide comprising a light chain variable region and a light chain constant region, with or without a leader sequence.

[0081] The term “complementarity determining regions” (“CDRs”) as used herein refers to each of the regions of an antibody variable region which are hypervariable in sequence and which determine antigen binding specificity. Generally, antibodies comprise six CDRs: three in the VH (CDR-H1 or heavy chain CDR1, CDR-H2, CDR-H3), and three in the VL (CDR-L1, CDR-L2, CDR-L3). Unless otherwise indicated, exemplary CDRs are shown in Tables 1-4 herein.

[0082] “Framework” or “FR” refers to the residues of the variable region residues that are not part of the complementary determining regions (CDRs). The FR of a variable region generally consists of four FRs: FR1, FR2, FR3, and FR4. Accordingly, the CDR and FR sequences generally appear in the following sequence in VH (or VL): FR1-CDR-H1(CDR-L1)-FR2-CDR-H2(CDR-L2)-FR3-CDR-H3(CDR-L3)-FR4. Exemplary FRs are shown in Tables 1-4 herein.

[0083] The term “variable region” or “variable domain” interchangeably refers to the domain of an antibody heavy or light chain that is involved in binding the antibody to antigen. The variable domains of the heavy chain and light chain (VH and VL, respectively) of a native antibody generally have similar structures, with each domain comprising four conserved framework regions (FRs) and three complementary determining regions (CDRs). See, e.g., Kindt et al. Kuby Immunology, 6th ed., W.H. Freeman and Co., page 91 (2007). A variable domain may comprise heavy chain (HC) CDR1-FR2-CDR2-FR3-CDR3 with or without all or a portion of FR1 and/or FR4; and light chain (LC) CDR1-FR2-CDR2-FR3-CDR3 with or without all or a portion of FR1 and/or FR4. That is, a variable domain may lack a portion of FR1 and/or FR4 so long as it retains antigen-binding activity. A single VH or VL domain may be sufficient to confer antigen-binding specificity. Furthermore, antibodies that bind a particular antigen may be isolated using a VH or VL domain from an antibody that binds the antigen to screen a library of complementary VL or VH domains, respectively. See, e.g., Portolano et al., J. Immunol. 150:880-887 (1993); Clarkson et al., Nature 352: 624-628 (1991).

[0084] An “antibody fragment” or “antigen binding fragment” refers to a molecule other than an intact antibody that comprises a portion of an intact antibody that binds the antigen (i.e., HVEM) to which the intact antibody binds. Examples of antibody fragments include but are not limited to Fv, Fab, Fab′, Fab′-SH, F(ab′)2; diabodies; linear antibodies; single-chain antibody molecules (e.g., scFv, and scFab); single domain antibodies (dAbs); and multispecific antibodies formed from antibody fragments. For a review of certain antibody fragments, see Holliger and Hudson, Nature Biotechnology 23:1126-1136 (2005).

[0085] The terms “full length antibody”, “intact antibody”, and “whole antibody” are used herein interchangeably to refer to an antibody having a structure substantially similar to a native antibody structure or, in the case of an IgG antibody, having heavy chains that contain an Fc region as defined herein above.

[0086] The light chain and heavy chain “constant regions” of an antibody refer to additional sequence portions outside of the FRs and CDRs and variable regions. Certain antibody fragments may lack all or some of the constant regions. From N- to C-terminus, each heavy chain has a variable domain (VH), also called a variable heavy domain or a heavy chain variable region, followed by three constant heavy domains (CH1, CH2, and CH3). Similarly, from N- to C-terminus, each light chain has a variable domain (VL), also called a variable light domain or a light chain variable region, followed by a constant light (CL) domain.

[0087] The term “Fc region” or “Fc domain” herein is used to define a C-terminal region of an immunoglobulin heavy chain that contains at least a portion of the constant region. The term includes native sequence Fc regions and variant Fc regions. In one aspect, a human IgG heavy chain Fc region extends from Cys226, or from Pro230, to the carboxyl-terminus of the heavy chain at Gly446 and Lys447 (EU numbering). Antibodies produced by host cells may undergo post-translational cleavage of one or more, particularly one or two, amino acids from the C-terminus of the heavy chain. Therefore, an antibody produced by a host cell by expression of a specific nucleic acid molecule encoding a full-length heavy chain may include the full-length heavy chain, or it may include a cleaved variant of the full-length heavy chain. This may be the case where the final two C-terminal amino acids of the heavy chain are glycine and lysine, respectively. Therefore, the C-terminal lysine, or the C-terminal glycine and lysine, of the Fc region may or may not be present. Thus, a “full-length heavy chain constant region” or a “full length antibody” for example, which is a human IgG1 antibody, includes an IgG1 with both a C-terminal glycine and lysine, without the C-terminal lysine, or without both the C-terminal glycine and lysine. Unless otherwise specified herein, numbering of amino acid residues in the Fc region or constant region is according to the EU numbering system, also called the EU index, as described in Kabat et al., Sequences of Proteins of Immunological Interest, 5th Ed. Public Health Service, National Institutes of Health, Bethesda, M D, 1991.

[0088] “Effector functions” refer to those biological activities attributable to the Fc region of an antibody, which vary with the antibody isotype. Examples of antibody effector functions include: Clq binding and complement dependent cytotoxicity (CDC); Fc receptor binding; antibody-dependent cell-mediated cytotoxicity (ADCC); phagocytosis; down regulation of cell surface receptors (e.g., B cell receptor); and B cell activation.

[0089] The “class” of an antibody refers to the type of constant domain or constant region possessed by its heavy chain. There are five major classes of antibodies: IgA, IgD, IgE, IgG, and IgM, and several of these may be further divided into subclasses (isotypes), e.g., IgG1, IgG2, IgG3, IgG4, IgA1, and IgA2. In certain aspects, the antibody is of the IgG1 isotype. In certain aspects, the antibody is of the IgG1 isotype with the P329G, L234A and L235A mutation to reduce Fc-region effector function. In other aspects, the antibody is of the IgG2 isotype. In certain aspects, the antibody is of the IgG4 isotype with the S228P mutation in the hinge region to improve stability of IgG4 antibody. In some aspects, the antibody may have a non-human IgG constant region, and may be, for example, a murine IgG2a antibody such as a murine IgG2a LALAPG antibody. The light chain of an antibody may be assigned to one of two types, called kappa (κ) and lambda (λ), based on the amino acid sequence of its constant domain.

[0090] The term “monoclonal antibody” as used herein refers to an antibody obtained from a population of substantially homogeneous antibodies, i.e., the individual antibodies comprising the population are identical and/or bind the same epitope, except for possible variant antibodies, e.g., containing naturally occurring mutations or arising during production of a monoclonal antibody preparation, such variants generally being present in minor amounts. In contrast to polyclonal antibody preparations, which typically include different antibodies directed against different determinants (epitopes), each monoclonal antibody of a monoclonal antibody preparation is directed against a single determinant on an antigen. Thus, the modifier “monoclonal” indicates the character of the antibody as being obtained from a substantially homogeneous population of antibodies, and is not to be construed as requiring production of the antibody by any particular method.

[0091] The term “chimeric” antibody refers to an antibody in which a portion of the heavy and/or light chain is derived from a particular source or species, while the remainder of the heavy and/or light chain is derived from a different source or species.

[0092] A “humanized” antibody refers to a chimeric antibody comprising amino acid residues from non-human CDRs and amino acid residues from human FRs. In certain aspects, a humanized antibody will comprise substantially all of at least one, and typically two, variable domains, in which all or substantially all of the CDRs correspond to those of a non-human antibody, and all or substantially all of the FRs correspond to those of a human antibody. A humanized antibody optionally may comprise at least a portion of an antibody constant region derived from a human antibody. A “humanized form” of an antibody, e.g., a non-human antibody, refers to an antibody that has undergone humanization.

[0093] “Humanized” or chimeric anti-HVEM monoclonal antibodies as described in Tables 1-3 can be produced using techniques described herein or otherwise known in the art. For example, standard methods for producing chimeric antibodies are known in the art. See, for review the following references: Morrison, Science 229:1202 (1985); Oi et al., BioTechniques 4:214 (1986); Cabilly et al., U.S. Pat. No. 4,816,567; Taniguchi et al., EP 171496; Morrison et al., EP 173494; Neuberger et al., WO 8601533; Robinson et al., WO 8702671; Boulianne et al., Nature 312:643 (1984); Neuberger et al., Nature 314:268 (1985).

[0094] The anti-HVEM antibodies provided herein may be monovalent, bivalent, trivalent or multivalent. For example, monovalent scFvs can be multimerized either chemically or by association with another protein or substance. A scFv that is fused to a hexahistidine tag or a Flag tag can be multimerized using Ni-NTA agarose (Qiagen) or using anti-Flag antibodies (Stratagene, Inc.). Additionally, monospecific, bispecific, trispecific or of greater multispecificity for HVEM antigen(s) can also be generated. See, e.g., PCT publications WO 93/17715; WO 92/08802; WO 91/00360; WO 92/05793; Tutt, et al., J. Immunol. 147:60-69 (1991); U.S. Pat. Nos. 4,474,893; 4,714,681; 4,925,648; 5,573,920; 5,601,819; Kostelny et. al., J. Immunol. 148:1547-1553 (1992).

[0095] A “multispecific” antibody is one that binds specifically to more than one target antigen, while a “bispecific” antibody is one that binds specifically to two antigens. An “antibody conjugate” is an antibody conjugated to one or more heterologous molecule(s), including but not limited to a therapeutic agent or a label.

[0096] As used herein, “bispecific anti-HVEM antibodies” are recombinant monoclonal antibodies and antibody-like molecules that combine the specificities of two distinct antibodies in one molecule. Thus, they can therefore simultaneously target two distinct antigens. As provided herein, one of the antigens targeted by the anti-HVEM bispecific antibody is a HVEM antigen and comprises any of the amino acid sequences shown in Tables 2-3.

[0097] Preferred examples of bispecific anti-HVEM antibodies include, but are not limited to, bispecific T-cell engager (BiTE) antibodies, dual-affinity retargeting molecules (DARTs), CrossMAb antibodies, DutaMab™ antibodies, DuoBody antibodies; Triomabs, TandAbs, bispecific NanoBodies, T-cells preloaded with bispecific antibodies, polyclonally-activated T-cells preloaded with bispecific antibodies, Tandem scFvs, diabodies, single chain diabodies, HSA bodies, (scFv)2 HSA antibodies, scFv-igG antibodies, Dock and Lock bispecific antibodies, DVD-IgG antibodies, TBTI DVD IgG antibodies, IgG-fynomers, Tetravalent bispecific tandem IgG antibodies, dual-targeting domain antibodies, chemically linked bispecific (Fab′)2 molecules, crosslinked mAbs, dual-action Fab IgG antibodies (DAF-IgGs), orthoFab-IgG antibodies, bispecific CovX-Bodies, bispecific hexavalent trimerbodies, 2 scFv linked to diphtheria toxin antibodies, and ART-Igs.

[0098] As used herein, Dual-Affinity Retargeting (DART) platform technology is a type of bispecific antibody developed by MacroGenics. The platform is capable of targeting multiple different epitopes with a single recombinant molecule and is specifically engineered to accommodate various region sequences in a “plug-and-play” fashion. In this technology, a proprietary covalent linkage is developed and thus, the molecule possesses exceptional stability, optimal heavy and light chain pairing, and predictable antigen recognition. The DART platform is believed to reduce the probability for immunogenicity.

[0099] As used herein, Cross monoclonal antibodies (CrossMAbs) are a type of bispecific antibody invented by Roche. The purpose of this technology is to create a bispecific antibody that closely resembles a natural IgG mAb as a tetramer consisting of two light chain-heavy chain pairs, and to solve the problem of light chain mispairing. This technology is believed to prevent unspecific binding of the light chain to its heavy counterpart thereby prevent unwanted side products. In addition, this method leaves the antigen-binding regions of the parental antibodies intact and thus can convert any antibodies into a bispecific IgG.

[0100] As used herein, a DutaMab is a type of bispecific antibody invented by Dutalys (acquired by Roche). This platform differs by developing fully human bispecific antibodies that show high affinity in each arm and simultaneously bind both targets. DutaMabs are also believed to possess excellent stability and good manufacturing properties.

[0101] Duobody antibodies are a type of bispecific antibodies created by Genmab. This platform generates stable bispecific human IgG1 antibodies and is able to fully retain IgG1 structure and function. Two parental IgG1 monoclonal antibodies are first separately produced, each containing single matched mutations in the third constant domain. Subsequently, these IgG1 antibodies are purified according to standard processes for recovery and purification. After production and purification (post-production), the two antibodies are recombined under tailored laboratory conditions resulting in a bispecific antibody product with a very high yield (typically >95%) (Labrijn et al, PNAS 2013; 110(13):5145-5150). The Duobody platform is believed to have minimal immunogenicity and can combine any antigen binding sequence derived from any antibody-generating platform to generate a bispecific product.

[0102] Additionally, the anti-HVEM antibodies described herein could be fused to a heterologous molecule, substance, or agent that possesses anti-cancer capabilities. This approach leverages the anti-HVEM antibody's ability to target tumor cells, thereby delivering the heterologous molecule, substance, or agent directly to the tumor site. For example, cytotoxic agents, when fused to the anti-HVEM antibody, can be delivered to a tumor cell. In some embodiments, the fused anti-HVEM antibody may have potent anti-cancer effects (e.g., synergism) as compared to administering the monoclonal antibody and the heterologous molecule, substance, or agent separately. Observed anti-tumor effects that can be improved, include but are not limited to, reduced cell proliferation, enhanced immunomodulatory functions, site-specific delivery, improved safety, and increased tolerability (i.e., decreased toxicity).

[0103] For example, the anti-HVEM antibody can be fused with antitumor cytokines, including but not limited to IL-2, IL-6, IL-7, IL-10, IL-12, IL-15, IL-17, IL-21, GM-CSF, TNF, IFN-α, IFN-3, IFN-γ, and FasL. Additionally, the anti-HVEM antibody can also be fused with 2 different cytokines simultaneously such as GM-CSF/IL-2, IL/12/IL-2, IL-12/GM-CSF, IL-and 12/TNF-α and therefore, form a “di-cytokine fusion protein.”

[0104] In a further preferred embodiment, the anti-HVEM antibody can be fused with a radionuclide, including but not limited to ¹³¹Iodine, ⁹⁰γYttrium, ¹⁷⁷Lutetium, ¹⁸⁸Rhenium, ⁶⁷Copper, ²¹¹Astatine, ²¹³Bismuth, ¹²⁵Iodine, and ¹¹¹Indium to form a radioconjugate.

[0105] In another preferred embodiment, the anti-HVEM antibody can be fused with a toxin to produce an immunotoxin. Examples of such toxins include, but are not limited to Pseudomonas exotoxin, staphylococcal enterotoxin A, ricin A-chain, and plant ribosome-inactivating protein saporin.

[0106] In another preferred embodiment, the anti-HVEM antibody can be fused with a pro-apoptotic protein. Examples of such proteins include, but are not limited to, caspase-3, FOXP3, and death ligand TNF-related apoptosis-inducing ligand (TRAIL).

[0107] In another preferred embodiment, the anti-HVEM antibody can be fused to an enzyme that is capable of converting a prodrug to a potent cytotoxic drug, resulting in an antibody-enzyme conjugate that can be used in antibody-directed enzyme prodrug therapy (ADEPT). Examples of such enzymes include, but are not limited to, carboxypeptidase G2, carboxypeptidase A, alkaline phosphatase, penicillin amidase, β-glucuronidase, β-lactamase, cytosine deaminase, aminopeptidase, and glycosidase.

[0108] In yet another preferred embodiment, the anti-HVEM antibody is fused with an anti-cancer drug (Kermer et al., Mol Cancer Ther, 11(6); 1279-88, 2012, Sharkey et al., CA Cancer J Clin; 56:226-243, 2006; Ortiz-Sanchez et al., Expert Opin Biol Ther, 8(5): 609-632, 2008; Kosobokova et al., CTM; 5(4): 102-110, List et al., Clinical Pharmacology: Advances and Applications; 5 (Suppl I): 29-45, 2013; Tse et al., PNAS; 97(22): 12266-12271, 2000, Heinze et al., International Journal of Oncology; 35: 167-173, 2009, EI-Mesery et al., Cell Death and Disease; 4, e916, 2013, Wiersma et al., British Journal of Haematology; 164, 296-310, 2013, Dohlsten et al., Proc. Natl. Acad. Sci; 91: 8945-8949, 1994, Melton et al., J Natl Cancer Inst; 88: 153-65, 1996, Cristina et al., Microbial Cell Factories; 14: 19, 2015, Weidle et al., Cancer Genomics and Proteomics; 9: 357-372, 2012, Helguera et al., Methods Mol Med; 109:347-74, 2005, and Young et al., Semin Oncol; 41(5):623-36, 2014).

[0109] As used herein, CD47, also known as Integrin Associated Protein, is a transmembrane receptor that belongs to the immunoglobulin superfamily and is ubiquitously expressed on the surface of normal and solid tumor cells. CD47 is also involved in numerous normal and pathological processes including immunity, apoptosis, proliferation, migration, and inflammation. Previous studies have demonstrated the expression of CD47 on various cancer cells and revealed its role in promoting cancer progression. By binding with signal regulatory protein (SIRPα), the primary ligand of CD47 expressed on phagocytic cells (dendritic cells, macrophages, and neutrophils), CD47 prohibits phagocytosis and thus allows tumor cells to evade immune surveillance. Thus, CD47 appears as an important therapeutic target for cancer treatments. Anti-CD47 monoclonal antibodies for clinical uses are currently being developed by Stanford University (phase I, cancer treatment), by the Ukraine Antitumor Center (phase I, cancer treatment), and by Vasculox, Inc. (Preclinical, organ transplantation).

[0110] As used herein, “anti-CD47 antibody” is defined as a monoclonal antibody that exclusively recognizes and binds to the antigen, CD47. Binding prevents the interaction between CD47 and SIRPα, a protein on phagocytes, thereby reversing the inhibition of phagocytosis normally caused by the CD47/SIRPα interaction. When co-administered with an anti-HVEM antibody (for example as separate antibodies or as a bi-specific antibody), the anti-CD47 antibody eliminates the “don't eat me signal” and allows the cancer antigen-specific antibody to more efficiently induce a tumor antigen-specific immune response.

[0111] As used herein, “antibody-dependent cell-mediated cytotoxicity” is a mechanism of cell-mediated immune defense whereby an effector cell of the immune system actively lyses a target cell, whose membrane-surface antigens have been bound by specific antibodies.

[0112] An “epitope” is a structure, usually made up of a short peptide sequence or oligosaccharide, that is specifically recognized or specifically bound by a component of the immune system. T-cell epitopes have generally been shown to be linear oligopeptides. Two epitopes correspond to each other if they can be specifically bound by the same antibody. Two epitopes correspond to each other if both are capable of binding to the same B cell receptor or to the same T cell receptor, and binding of one antibody to its epitope substantially prevents binding by the other epitope (e.g., less than about 30%, preferably, less than about 20%, and more preferably, less than about 10%, 5%, 1%, or about 0.1% of the other epitope binds). In the present invention, multiple epitopes can make up a HVEM antigen.

[0113] The term “HVEM antigen” as used herein covers the polypeptide sequence encoded by a polynucleotide sequence cloned into the LAMP Construct which was used to elicit an innate or adaptive immune response in a non-human vertebrate. A “HVEM antigen” encompasses both a single HVEM antigen as well as multiple HVEM antigenic sequences (derived from the same or different proteins) cloned into the LAMP construct.

[0114] The term “anti-HVEM antibody presenting cell” as used herein includes any cell which presents on its surface an anti-HVEM antibody as described herein in association with a major histocompatibility complex molecule, or portion thereof, or, alternatively, one or more non-classical MHC molecules, or a portion thereof. Examples of suitable APCs are discussed in detail below and include, but are not limited to, whole cells such as macrophages, dendritic cells, B cells, hybrid APCs, and foster HVEM antigen presenting cells.

[0115] As used herein, “partially human” refers to a nucleic acid having sequences from both a human and a non-human vertebrate. In the context of partially human sequences, the partially human nucleic acids have sequences of human immunoglobulin coding regions and sequences based on the non-coding sequences of the endogenous immunoglobulin region of the non-human vertebrate. The term “based on” when used with reference to endogenous non-coding sequences from a non-human vertebrate refers to sequences that correspond to the non-coding sequence and share a relatively high degree of homology with the non-coding sequences of the endogenous loci of the host vertebrate, e.g., the non-human vertebrate from which the ES cell is derived. Preferably, the non-coding sequences share at least an 80%, more preferably 90% homology with the corresponding non-coding sequences found in the endogenous loci of the non-human vertebrate host cell into which a partially human molecule comprising the non-coding sequences has been introduced.

[0116] The term “immunoglobulin variable region” as used herein refers to a nucleotide sequence that encodes all or a portion of a variable region of an anti-HVEM antibody as described in Tables 2-3. Immunoglobulin regions for heavy chains may include but are not limited to all or a portion of the V, D, J, and switch regions, including introns. Immunoglobulin region for light chains may include but are not limited to the V and J regions, their upstream flanking sequences, introns, associated with or adjacent to the light chain constant region gene.

[0117] By “transgenic animal” is meant a non-human animal, usually a mammal, having an exogenous nucleic acid sequence present as an extrachromosomal element in a portion of its cells or stably integrated into its germ line DNA (i.e., in the genomic sequence of most or all of its cells). In generating a transgenic animal comprising human sequences, a partially human nucleic acid is introduced into the germ line of such transgenic animals by genetic manipulation of, for example, embryos or embryonic stem cells of the host animal according to methods well known in the art.

[0118] A “vector” includes plasmids and viruses and any DNA or RNA molecule, whether self-replicating or not, which can be used to transform or transfect a cell.

[0119] As used herein, a “genetic modification” refers to any addition, deletion or disruption to a cell's normal nucleotides. Art recognized methods include viral mediated gene transfer, liposome mediated transfer, transformation, transfection and transduction, e.g., viral-mediated gene transfer using adenovirus, adeno-associated virus and herpes virus, as well as retroviral based vectors.

[0120] In the present invention, a “PD-1 signaling inhibitor” is an exogenous factor, such as a pharmaceutical compound or molecule that inhibits or prevents the activation of PD-1 by its ligand PD-L1 and thereby blocks or inhibits PD-1 signaling in cells within the cancerous tumor. A PD-1 signaling inhibitor is defined broadly as any molecule that prevents the negatively regulation by PD-1 of T-cell activation. Preferred examples of a PD-1 signaling inhibitor includes, but is not limited to, a PD-1 antagonist and/or a PD-L1 antagonist.

[0121] In the present invention, a “PD-1 antagonist” is defined as a molecule that inhibits PD-1 signaling by binding to or interacting with PD-1 to prevent or inhibit the binding and/or activation of PD-1 by PD-L1, thereby inhibiting PD-1 signaling and/or enhancing T-cell activation. Preferred examples of a PD-1 antagonist, include, but are not limited to an anti-PD-1 antibody which are well known in the art. See, Topalian, et al. NEJM 2012.

[0122] In the present invention, a “PD-L1 antagonist” is defined as a molecule that inhibits PD-1 signaling by binding to or inhibiting PD-L1 from binding and/or activating PD-1, thereby inhibiting PD-1 signaling and/or enhancing T-cell activation. Preferred examples of a PD-L1 antagonist, include, but are not limited to an anti-PD-L1 antibody which are well known in the art. See, Brahmer, et al. NEJM 2012.

[0123] In the present invention, a “CTLA-4 antagonist” is defined as a molecule that inhibits CTLA-4 signaling by binding to or inhibiting CTLA-4 from binding and/or activating to B7 molecules, known in the art to be present on antigen-presenting cells, thereby preventing interactions of B7 molecules with the co-stimulatory molecule CD28, and inhibiting T-cell function. Preferred embodiments of a CTLA-4 antagonist, include, but are not limited to anti-CTLA-4 antibodies.

[0124] In the present invention, a “LAG3 antagonist” is defined as a molecule that inhibits LAG3 signaling by binding to or inhibiting LAG3 from binding and/or activating MHC molecules and any other molecule, known in the art to be present on antigen-presenting cells, thereby preventing LAG3 interactions and promoting T-cell function. Preferred embodiments of a LAG3 antagonist, include, but are not limited to anti-LAG3 antibodies.

[0125] In the present invention, a “TIM-3 antagonist” is defined as a molecule that inhibits the CD8+ and CD4+Th1-specific cell surface protein, TIM-3, which, when ligated by galectin-9, for example, causes T-cell death. Preferred embodiments of a TIM-3 antagonist, include, but are not limited to anti-TIM-3 antibodies that block interaction with its ligands.

[0126] In the present invention, a PD-1 antagonist, a CTLA-4 antagonist, a TIM-3 antagonist, and a LAG3 antagonist are considered as “check-point inhibitors” or “check-point antagonists” or “T-cell checkpoint antagonists”. Other examples of checkpoint antagonists are well known in the art. These molecules can all be administered in combination with an anti-HVEM antibody or can be included in a bi-specific anti-HVEM antibody described herein.

[0127] As used herein, “anti-CXCL12 antibody” or a “CXC12 antagonist” is defined as a monoclonal antibody or small molecule that exclusively recognizes the antigen, CXCL12, and thereby elicits immune responses, such as Fc receptor-mediated phagocytosis and antibody-dependent cell-mediated cytotoxicity. Preferred examples of anti-CXCL12 antibodies include, but are not limited to, MAB310 (R&D Systems) and hu30D8. It has been reported in the literature that anti-CXCL12 antibodies can coat tumor cells and therefore are particularly useful in co-administration and/or in making bi-specific antibodies with the anti-HVEM antibodies as described herein.

[0128] Similarly, as used herein, an “anti-CXCR4 antibody” or a “CXCR antagonist” is defined as a monoclonal antibody or small molecule that exclusively recognizes the CXCR4 receptor on T cells and thereby elicits immune responses, such as Fc receptor-mediated phagocytosis and antibody-dependent cell-mediated cytotoxicity. Examples of anti-CXCR4 inhibitors include AMD3100, BMS-936564/MDX-1338, AMD11070, or LY2510924. Co-administration and/or in making bi-specific antibodies with an anti-CXCR4 antibody and the anti-HVEM antibodies are preferred embodiments.

[0129] As used herein, CAR T-cells, also known as chimeric antigen receptor T-cells, are produced by using adoptive cell transfer technique. T-cells are first collected from patients' blood and recombinant receptors are introduced into these T-cells using genetic engineering methods such as retroviruses. CAR T-cells are then infused into the patient, the tumor-associated antigen is recognized by the CAR T-cell, and is destroyed. Thus, CAR T-cells enhance tumor specific immunosurveillance. The structure of CAR most commonly incorporates a single-chain variable fragment (scFv) derived from a monoclonal antibody that links to intracellular signaling domains and forms a single chimeric protein. In the present invention, the CAR T-cell is developed using scFV, variable regions or CDRs as described herein.

[0130] Thus, in preferred embodiments, the HVEM-targeted immune response agent of the present invention, whether it be an anti-HVEM antibody (e.g., a bispecific anti-HVEM antibody), a CAR T-cell engineered to express a chimeric antigen receptor comprising the anti-HVEM antibody sequences described herein, or a T-cell preloaded with anti-HVEM antibodies sequences, has synergistic activity with a second molecule co-administered with the anti-HVEM targeted agent.

[0131] In the present invention, a “T-cell co-receptor” is a cell surface receptor that binds to ligands on antigen-presenting cells that are distinct from the peptide-MHC complex that engages the T-cell receptor. Ligation of T-cell co-receptors enhance the antigen-specific activation of the T-cell by recruiting intracellular signaling proteins (e.g., NFkappaB and PI3-kinase) inside the cell involved in the signaling of the activated T lymphocyte. Preferred embodiments of a T-cell co-receptor antagonist, include, but are not limited to anti-T-cell co-receptor antibodies, such as, for example, antibodies directed to 4-1 BB(CD137) and ICOS (CD278).

[0132] Unless defined otherwise, all technical and scientific terms used herein have the same meaning as commonly understood by one of ordinary skill in the art to which this invention belongs. All publications mentioned herein are incorporated by reference for the purpose of describing and disclosing devices, formulations and methodologies that may be used in connection with the presently described invention.

[0133] Additionally, the present invention employs, unless otherwise indicated, conventional molecular biology, microbiology, and recombinant DNA techniques within the skill of the art. Such techniques are explained fully in the literature. See, e.g., Maniatis, Fritsch & Sambrook, In Molecular Cloning: A Laboratory Manual (1982); DNA Cloning: A Practical Approach, Volumes I and II (D. N. Glover, ed., 1985); Oligonucleotide Synthesis (M. J. Gait, ed., 1984); Nucleic Acid Hybridization (B. D. Hames & S. J. Higgins, eds., 1985); Transcription and Translation (B. D. Hames & S. I. Higgins, eds., 1984); Animal Cell Culture (R. I. Freshney, ed., 1986); Immobilized Cells and Enzymes (IRL Press, 1986); B. Perbal, A Practical Guide to Molecular Cloning (1984

### Anti-HVEM Antibodies

[0134] The present invention encompasses the anti-HVEM antibody amino acid sequences described in Tables 1-3. These antibodies were obtained by using Immunomic Therapeutics Universal Intracellular Targeted Expression (UNITE™) platform technology as described in U.S. Ser. No. 16/607,082 filed on Oct. 21, 2019 (published as US Published Appl. No. 2020/0377570), which is hereby incorporated by reference in its entirety.

[0135] It is known that the generation of antibodies to HVEM is particularly difficult. In the past, the number and repertoire of obtained antibodies to HVEM has been minimal, lacked variation and failed to produce desired therapeutic efficacy. Applicants used their proprietary ILC-4 LAMP Construct as described in U.S. Ser. No. 16/607,082 with carefully selected HVEM antigens to unexpectedly obtain the new antibodies described herein, and specifically in Tables 1-3.

[0136] Tables 1-3 describe different anti-HVEM antibodies. Specifically, Table 1 provides the names of each heavy chain (“Heavy_chain_id”) and light chain (“Light_chain_id”) variable domains making up each antibody identified by “AntibodyId” or “Ab_Num_id”. Table 1 also provides binding data information of selected antibodies tested, based on bio-layer interferometry assays described in the Examples herein, and IC50 results from BTLA and LIGHT competition a says also described in the Examples. “NA” in the BTLA or LIGHT competition assay columns in Table 1 indicates that the antibody showed some degree of competition with either BTLA or LIGHT for HVEM binding, but that an IC50 was not measurable. “NA*” in Table 1 indicates that the antibody did not detectably compete with BTLA or LIGHT for HVEM binding in the assay.

[0137] Table 2 provides the amino acid sequence of the variable domain (“VH_Full_lenght_AA”) of the heavy chain (“Heavy_chain_id”) making up the different HVEM antibodies described in Table 1. Table 2 also provides the amino acid sequences making up each of the three complementarity-determining regions (“CDRs”) for each heavy chain (the CDRs identified in Table 2 as “CDRH1,” “CDRH2”, and “CDRH3” and the full variable domain of the heavy chains are shown in Table 3 as SEQ ID NO: 1-201) and and each light chain (the CDRs identified in Table 2 as “CDRL1,” “CDRL2”, and “CDRL3” and the full variable domain of the light chains are shown Table 3 as SEQ ID NO: 874-1032). Importantly Table 2 also groups the obtained antibodies heavy and light chain sequences into “clusters” or “clades” based on the overall similarity of the full length sequences. From these clusters, consensus sequences for each domain (FR1, CDR1, FR2, CDR2, FR3, CDR3, and FR4) for both he heavy and light chains) are created and shown. In preferred embodiments, antibodies comprising the consensus domains are specifically contemplated;

[0138] Table 3 provides the amino acid sequence of the variable domain (“VL_Full_lenght_AA”) of the light chain (“Light_chain_id”) making up the different HVEM antibodies described in Table 1;

[0139] Table 4 provides the SEQ ID Nos: of each domain, including the consensus sequences of each domain within a particular cluster. In preferred embodiments, an antibody described herein comprises at least one of the domains of SEQ ID NO: 202-873 and/or at least one of SEQ ID NO:1033-1449. In further preferred embodiment, the antibody comprises at least one of the consensus domains identified in Table 2.

TABLE 1

| | | | | | | | BTLA | Light |
|---|---|---|---|---|---|---|---|---|
| | Ab_{—} | Heavy_{—} | Light_{—} | K_{D} | kₒₙ | K_{off} | IC50 | IC50 |
| AntibodyId | Num_Id | chain_id | chain_id | (M) | (1/Ms) | (1/s) | nM | nM |
| H5S14-1A1A | Ab_001 | H5S14-1AH | H5S14-1AL | 5.50E−07 | 2.80E+05 | 1.54E−01 | 2.2 | 714.7 |
| H5S14-2A2A | Ab_002 | H5S14-2AH | H5S14-2AL | | | | | |
| H5S14-3A3A | Ab_003 | H5S14-3AH | H5S14-3AL | | | | | |
| H5S14-24A4A | Ab_004 | H5S14-24AH | H5S14-4AL | 5.40E+12 | 7.69E+02 | 4.15E+15 | | |
| H5S14-4A4A | Ab_005 | H5S14-4AH | H5S14-4AL | 1.24E+11 | 2.24E+03 | 2.77E+14 | | |
| H5S14-5A5A | Ab_006 | H5S14-5AH | H5S14-5AL | 1.96E−08 | 3.53E+05 | 6.92E−03 | NA* | 24.6 |
| H5S14-6A6A | Ab_007 | H5S14-6AH | H5S14-6AL | | | | | |
| H5S14-11A10A | Ab_008 | H5S14-11AH | H5S14-10AL | 4.80E−09 | 4.82E+05 | 2.31E−03 | 1.9 | NA |
| H5S14-8A7A | Ab_009 | H5S14-8AH | H5S14-7AL | 3.51E−08 | 4.97E+05 | 1.75E−02 | 2.1 | NA |
| H5S14-10A9A | Ab_010 | H5S14-10AH | H5S14-9AL | 7.21E−06 | 1.59E+05 | 1.15E+00 | 11.3 | NA |
| H5S14-12A11A | Ab_011 | H5S14-12AH | H5S14-11AL | 2.78E−09 | 3.85E+05 | 1.07E−03 | NA* | 20.5 |
| H5S14-13A11A | Ab_012 | H5S14-13AH | H5S14-11AL | 3.22E−09 | 3.75E+05 | 1.21E−03 | NA* | 20.9 |
| H5S14-14A11A | Ab_013 | H5S14-14AH | H5S14-11AL | 4.39E−09 | 3.40E+05 | 1.49E−03 | NA* | 28.1 |
| H5S14-15A12A | Ab_014 | H5S14-15AH | H5S14-12AL | | | | | |
| H5S14-16A13A | Ab_015 | H5S14-16AH | H5S14-13AL | | | | | |
| H5S14-17A15A | Ab_016 | H5S14-17AH | H5S14-15AL | | | | | |
| H5S14-18A16A | Ab_017 | H5S14-18AH | H5S14-16AL | | | | | |
| H5S14-21A19A | Ab_018 and Ab_019 | H5S14-21AH | H5S14-19AL | 2.65E−08 | 2.45E+05 | 6.47E−03 | NA* | NA |
| H5S14-22A20A | Ab_020 | H5S14-22AH | H5S14-20AL | | | | | |
| H5S14-29A20A | Ab_021 | H5S14-29AH | H5S14-20AL | | | | | |
| H5S14-23A21A | Ab_022 | H5S14-23AH | H5S14-21AL | | | | | |
| H5S14-27A23A | Ab_023 | H5S14-27AH | H5S14-23AL | | | | | |
| H5S15-1A1A | Ab_024 | H5S15-1AH | H5S15-1AL | | | | | |
| H5S15-2A2A | Ab_025 | H5S15-2AH | H5S15-2AL | 1.16E−08 | 5.15E+05 | 5.96E−03 | 10 | NA |
| H5S15-11A3B | Ab_026 | H5S15-11AH | H5S15-3BL | 1.11E−08 | 7.76E+05 | 8.64E−03 | 2.4 | NA |
| H5S15-17A16A | Ab_027 | H5S15-17AH | H5S15-16AL | 2.68E−09 | 6.39E+05 | 1.71E−03 | 2.2 | NA |
| H5S15-33A29A | Ab_028 | H5S15-33AH | H5S15-29AL | 6.90E−09 | 3.86E+05 | 2.66E−03 | 1.4 | NA |
| H5S15-14A14B | Ab_029 | H5S15-14AH | H5S15-14BL | 4.70E−08 | 8.58E+05 | 4.03E−02 | 1.3 | NA |
| H5S15-18A17A | Ab_030 | H5S15-18AH | H5S15-17AL | 1.03E−08 | 4.05E+05 | 4.19E−03 | NA* | 21.9 |
| H5S15-8A17A | Ab_031 | H5S15-8AH | H5S15-17AL | 1.10E−08 | 2.91E+05 | 3.21E−03 | NA* | 22 |
| H5S15-7A8A | Ab_032 | H5S15-7AH | H5S15-8AL | | | | | |
| H5S15-7B8A | Ab_033 | H5S15-7BH | H5S15-8AL | | | | | |
| H5S15-16A11B | Ab_034 | H5S15-16AH | H5S15-11BL | 8.67E−09 | 2.70E+05 | 2.35E−03 | 1.3 | NA |
| H5S15-16A11E | | H5S15-16AH | H5S15-11EL | | | | | |
| H5S15-9A10A | Ab_035 | H5S15-9AH | H5S15-10AL | 6.58E−09 | 3.57E+05 | 2.35E−03 | 1.4 | NA |
| H5S15-12A13A | Ab_036 | H5S15-12AH | H5S15-13AL | 1.87E−08 | 5.71E+05 | 1.07E−02 | 0.8 | 18.7 |
| H5S15-13A15A | Ab_037 | H5S15-13AH | H5S15-15AL | | | | | |
| H5S15-19A18A | Ab_038 | H5S15-19AH | H5S15-18AL | | | | | |
| H5S15-21A19A | Ab_039 | H5S15-21AH | H5S15-19AL | | | | | |
| H5S15-23A21A | Ab_040 | H5S15-23AH | H5S15-21AL | | | | | |
| H5S15-27A22A | Ab_041 | H5S15-27AH | H5S15-22AL | | | | | |
| H5S15-28A23A | Ab_042 | H5S15-28AH | H5S15-23AL | | | | | |
| H5S15-29A24A | Ab_043 | H5S15-29AH | H5S15-24AL | 3.92E−09 | 3.78E+05 | 1.48E−03 | 1.1 | 15.3 |
| H5S15-30A26A | Ab_044 | H5S15-30AH | H5S15-26AL | 1.97E−09 | 3.08E+06 | 6.05E−03 | NA | NA |
| H5S15-31A12C | Ab_045 | H5S15-31AH | H5S15-12CL | 7.32E−09 | 3.62E+05 | 2.65E−03 | NA* | 31 |
| H5S15-35A31A | Ab_046 | H5S15-35AH | H5S15-31AL | 4.59E−09 | 3.68E+05 | 1.69E−03 | NA* | 27.2 |
| H5S15-36A32A | Ab_047 | H5S15-36AH | H5S15-32AL | | | | | |
| H5S19-24A22A | Ab_048 | H5S19-24AH | H5S19-22AL | | | | | |
| H5S19-25A24A | Ab_049 | H5S19-25AH | H5S19-24AL | | | | | |
| H5S19-9A11A | Ab_050 | H5S19-9AH | H5S19-11AL | 4.22E−08 | 1.14E+05 | 4.81E−03 | 3 | 116.6 |
| H5S19-4A6A | Ab_051 | H5S19-4AH | H5S19-6AL | 2.88E−08 | 4.96E+05 | 1.43E−02 | 1.3 | 18.6 |
| H5S19-18A17B | Ab_052 | H5S19-18AH | H5S19-17BL | 9.09E−08 | 8.07E+04 | 7.34E−03 | NA | NA |
| H5S19-20A20A | Ab_053 | H5S19-20AH | H5S19-20AL | 1.03E−07 | 4.27E+04 | 4.39E−03 | NA | NA |
| H5S19-21A17C | Ab_054 | H5S19-21AH | H5S19-17CL | 2.04E−08 | 1.43E+05 | 2.91E−03 | NA | 368.9 |
| H5S19-1A1A | Ab_055 | H5S19-1AH | H5S19-1AL | 5.44E−07 | 3.02E+04 | 1.64E−02 | NA* | NA |
| H5S19-11A9B | Ab_056 | H5S19-11AH | H5S19-9BL | | | | | |
| H5S19-5A7A | Ab_057 | H5S19-5AH | H5S19-7AL | | | | | |
| H5S19-6A8A | Ab_058 | H5S19-6AH | H5S19-8AL | 2.67E−09 | 4.69E+05 | 1.25E−03 | 1.3 | NA |
| H5S19-3B10A | | H5S19-3BH | H5S19-10AL | | | | | |
| H5S19-3B10B | Ab_059 | H5S19-3BH | H5S19-10BL | | | | | |
| H5S19-8A16A | Ab_060 | H5S19-8AH | H5S19-16AL | | | | | |
| H5S19-13A16B | Ab_061 | H5S19-13AH | H5S19-16BL | | | | | |
| H5S19-16A18A | Ab_062 | H5S19-16AH | H5S19-18AL | | | | | |
| H5S20-4A33A | | H5S20-4AH | H5S20-33AL | | | | | |
| H5S20-4A4A | Ab_063 and Ab_159 | H5S20-4AH | H5S20-4AL | 4.09E−09 | 5.28E+05 | 2.16E−03 | 2.2 | 5.7 |
| H5S20-6A6A | Ab_064 | H5S20-6AH | H5S20-6AL | 1.07E−08 | 3.33E+05 | 3.55E−03 | 1.5 | 8.7 |
| H5S20-39A29A | Ab_065 | H5S20-39AH | H5S20-29AL | 1.49E−08 | 3.30E+05 | 4.90E−03 | 1.7 | 8 |
| H5S20-1A1A | Ab_066 | H5S20-1AH | H5S20-1AL | 9.59E−09 | 2.58E+05 | 2.47E−03 | 1.5 | 10.4 |
| H5S20-7B7B | Ab_067 | H5S20-7BH | H5S20-7BL | 2.65E−09 | 5.05E+05 | 1.34E−03 | NA* | 13.6 |
| H5S20-24A19A | Ab_068 | H5S20-24AH | H5S20-19AL | 5.99E−09 | 3.20E+05 | 1.92E−03 | NA* | 20.5 |
| H5S20-43A19B | Ab_069 and Ab_155 | H5S20-43AH | H5S20-19BL | 2.97E−09 | 2.71E+05 | 8.03E−04 | NA* | 22.3 |
| H5S20-7A7A | Ab_070 | H5S20-7AH | H5S20-7AL | 2.33E−09 | 4.38E+05 | 1.02E−03 | NA* | 17.8 |
| H5S20-3B7A | Ab_071 and Ab_149 | H5S20-3BH | H5S20-7AL | 2.20E−09 | 4.23E+05 | 9.30E−04 | NA* | 20.4 |
| H5S20-15A13A | Ab_072 | H5S20-15AH | H5S20-13AL | 1.17E−08 | 1.69E+06 | 1.97E−02 | 1.6 | 252.3 |
| H5S20-9A9A | Ab_073 | H5S20-9AH | H5S20-9AL | 3.70E−07 | 2.94E+05 | 1.09E−01 | 3.2 | NA |
| H5S20-52A21A | Ab_074 | H5S20-52AH | H5S20-21AL | 4.82E−08 | 5.65E+05 | 2.72E−02 | 1.6 | NA |
| H5S20-12A10A | Ab_075 | H5S20-12AH | H5S20-10AL | | | | | |
| H5S20-26A22A | Ab_076 | H5S20-26AH | H5S20-22AL | | | | | |
| H5S20-31A16B | Ab_077 | H5S20-31AH | H5S20-16BL | 1.24E−05 | 8.66E+04 | 1.08E+00 | NA | NA |
| H5S20-45A34A | Ab_078 | H5S20-45AH | H5S20-34AL | 4.95E−09 | 4.66E+05 | 2.30E−03 | 1.5 | 14.5 |
| H5S20-22A18A | Ab_079 | H5S20-22AH | H5S20-18AL | 1.39E−08 | 1.56E+06 | 2.16E−02 | 11 | NA |
| H5S20-27A23A | Ab_080 | H5S20-27AH | H5S20-23AL | 7.09E−09 | 1.62E+05 | 1.15E−03 | 1.8 | 37.3 |
| H5S20-44A32A | Ab_081 | H5S20-44AH | H5S20-32AL | | | | | |
| H5S20-55A36A | Ab_082 | H5S20-55AH | H5S20-36AL | | | | | |
| H5S20-49A39A | Ab_083 and Ab_153 | H5S20-49AH | H5S20-39AL | 6.58E−08 | 2.54E+05 | 1.67E−02 | 1.9 | NA |
| H5S20-51A40A | Ab_084 | H5S20-51AH | H5S20-40AL | | | | | |
| H5S20-53A41A | Ab_085 | H5S20-53AH | H5S20-41AL | | | | | |
| H5S20-56A25A | Ab_086 | H5S20-56AH | H5S20-25AL | | | | | |
| H5S20-59A43A | Ab_087 | H5S20-59AH | H5S20-43AL | 1.57E−06 | 2.06E+05 | 3.23E−01 | 5.2 | NA |
| H5S14-19A17A | Ab_088 | H5S14-19AH | H5S14-17AL | | | | | |
| H5S14-30A25A | Ab_089 | H5S14-30AH | H5S14-25AL | | | | | |
| H5S14-7A4A | Ab_090 | H5S14-7AH | H5S14-4AL | | | | | |
| H5S14-7A4B | Ab_090 | H5S14-7AH | H5S14-4BL | | | | | |
| H5S15-10A11A | Ab_091 | H5S15-10AH | H5S15-11AL | | | | | |
| H5S15-15A8A | Ab_092 | H5S15-15AH | H5S15-8AL | | | | | |
| H5S15-16B11C | Ab_093 | H5S15-16BH | H5S15-11CL | | | | | |
| H5S15-20A11D | Ab_094 | H5S15-20AH | H5S15-11DL | | | | | |
| H5S15-24A3A | Ab_095 | H5S15-24AH | H5S15-3AL | | | | | |
| H5S15-25A14C | Ab_096 | H5S15-25AH | H5S15-14CL | | | | | |
| H5S15-26A17A | Ab_097 | H5S15-26AH | H5S15-17AL | | | | | |
| H5S15-32A28A | Ab_098 | H5S15-32AH | H5S15-28AL | | | | | |
| H5S15-37A21A | Ab_099 | H5S15-37AH | H5S15-21AL | | | | | |
| H5S15-38A4A | Ab_100 | H5S15-38AH | H5S15-4AL | | | | | |
| H5S15-39A22A | Ab_101 | H5S15-39AH | H5S15-22AL | | | | | |
| H5S15-3A3A | Ab_102 | H5S15-3AH | H5S15-3AL | | | | | |
| H5S15-40A18A | Ab_103 | H5S15-40AH | H5S15-18AL | | | | | |
| H5S15-5A14A | Ab_104 | H5S15-5AH | H5S15-14AL | | | | | |
| H5S15-6A6A | Ab_105 | H5S15-6AH | H5S15-6AL | | | | | |
| H5S19-12B17A | Ab_106 | H5S19-12BH | H5S19-17AL | | | | | |
| H5S19-12C17A | Ab_107 | H5S19-12CH | H5S19-17AL | | | | | |
| H5S19-14A17A | Ab_108 | H5S19-14AH | H5S19-17AL | | | | | |
| H5S19-14B23A | Ab_109 | H5S19-14BH | H5S19-23AL | | | | | |
| H5S19-17A17A | Ab_110 | H5S19-17AH | H5S19-17AL | | | | | |
| H5S19-19A19A | Ab_111 | H5S19-19AH | H5S19-19AL | | | | | |
| H5S19-20B26A | Ab_112 | H5S19-20BH | H5S19-26AL | | | | | |
| H5S19-20C28A | Ab_113 | H5S19-20CH | H5S19-28AL | | | | | |
| H5S19-22A17D | Ab_114 | H5S19-22AH | H5S19-17DL | | | | | |
| H5S19-26A17E | Ab_115 | H5S19-26AH | H5S19-17EL | | | | | |
| H5S19-27A17F | Ab_116 | H5S19-27AH | H5S19-17FL | | | | | |
| H5S19-3A5A | Ab_117 | H5S19-3AH | H5S19-5AL | | | | | |
| H5S19-3C10B | Ab_118 | H5S19-3CH | H5S19-10BL | | | | | |
| H5S20-10A9B | Ab_119 | H5S20-10AH | H5S20-9BL | | | | | |
| H5S20-10B9A | Ab_120 | H5S20-10BH | H5S20-9AL | | | | | |
| H5S20-10B9D | Ab_120 | H5S20-10BH | H5S20-9DL | | | | | |
| H5S20-10B9E | Ab_120 | H5S20-10BH | H5S20-9EL | | | | | |
| H5S20-11A1A | Ab_121 | H5S20-11AH | H5S20-1AL | | | | | |
| H5S20-11B1B | Ab_122 | H5S20-11BH | H5S20-1BL | | | | | |
| H5S20-11C28A | Ab_123 | H5S20-11CH | H5S20-28AL | | | | | |
| H5S20-14A12A | Ab_124 | H5S20-14AH | H5S20-12AL | | | | | |
| H5S20-14A1A | Ab_124 | H5S20-14AH | H5S20-1AL | | | | | |
| H5S20-14B12A | Ab_125 | H5S20-14BH | H5S20-12AL | | | | | |
| H5S20-14C12A | Ab_126 | H5S20-14CH | H5S20-12AL | | | | | |
| H5S20-14D12B | Ab_127 | H5S20-14DH | H5S20-12BL | | | | | |
| H5S20-17A21A | Ab_128 | H5S20-17AH | H5S20-21AL | | | | | |
| H5S20-18A15A | Ab_129 | H5S20-18AH | H5S20-15AL | | | | | |
| H5S20-20A16A | Ab_130 | H5S20-20AH | H5S20-16AL | | | | | |
| H5S20-20B16B | Ab_131 | H5S20-20BH | H5S20-16BL | | | | | |
| H5S20-21A17A | Ab_132 | H5S20-21AH | H5S20-17AL | | | | | |
| H5S20-23A3B | Ab_133 | H5S20-23AH | H5S20-3BL | | | | | |
| H5S20-25A20A | Ab_134 | H5S20-25AH | H5S20-20AL | | | | | |
| H5S20-28A24A | Ab_135 | H5S20-28AH | H5S20-24AL | | | | | |
| H5S20-28B24A | Ab_136 | H5S20-28BH | H5S20-24AL | | | | | |
| H5S20-29A1A | Ab_137 | H5S20-29AH | H5S20-1AL | | | | | |
| H5S20-30A24A | Ab_138 | H5S20-30AH | H5S20-24AL | | | | | |
| H5S20-31B16B | Ab_139 | H5S20-31BH | H5S20-16BL | | | | | |
| H5S20-32A7C | Ab_140 | H5S20-32AH | H5S20-7CL | | | | | |
| H5S20-32B31A | Ab_141 | H5S20-32BH | H5S20-31AL | | | | | |
| H5S20-32B7A | Ab_141 | H5S20-32BH | H5S20-7AL | | | | | |
| H5S20-32C7A | Ab_142 | H5S20-32CH | H5S20-7AL | | | | | |
| H5S20-33A7D | Ab_143 | H5S20-33AH | H5S20-7DL | | | | | |
| H5S20-34A8B | Ab_144 | H5S20-34AH | H5S20-8BL | | | | | |
| H5S20-35A25A | Ab_145 | H5S20-35AH | H5S20-25AL | | | | | |
| H5S20-36A26A | Ab_146 | H5S20-36AH | H5S20-26AL | | | | | |
| H5S20-37A27A | Ab_147 | H5S20-37AH | H5S20-27AL | | | | | |
| H5S20-38A7D | Ab_148 | H5S20-38AH | H5S20-7DL | | | | | |
| H5S20-3C7A | Ab_150 | H5S20-3CH | H5S20-7AL | | | | | |
| H5S20-40A30A | Ab_151 | H5S20-40AH | H5S20-30AL | | | | | |
| H5S20-41A25A | Ab_152 | H5S20-41AH | H5S20-25AL | | | | | |
| H5S20-41B25A | Ab_153 | H5S20-41BH | H5S20-25AL | | | | | |
| H5S20-42A8A | Ab_154 | H5S20-42AH | H5S20-8AL | | | | | |
| H5S20-46A36A | Ab_156 | H5S20-46AH | H5S20-36AL | | | | | |
| H5S20-48A7D | Ab_157 | H5S20-48AH | H5S20-7DL | | | | | |
| H5S20-4B12A | Ab_160 | H5S20-4BH | H5S20-12AL | | | | | |
| H5S20-4B33A | Ab_160 | H5S20-4BH | H5S20-33AL | | | | | |
| H5S20-4B42A | Ab_160 | H5S20-4BH | H5S20-42AL | | | | | |
| H5S20-50A7D | Ab_161 | H5S20-50AH | H5S20-7DL | | | | | |
| H5S20-54A24A | Ab_162 | H5S20-54AH | H5S20-24AL | | | | | |
| H5S20-57A25A | Ab_163 | H5S20-57AH | H5S20-25AL | | | | | |
| H5S20-58A21A | Ab_164 | H5S20-58AH | H5S20-21AL | | | | | |
| H5S20-60A7E | Ab_165 | H5S20-60AH | H5S20-7EL | | | | | |
| H5S20-61A29A | Ab_166 | H5S20-61AH | H5S20-29AL | | | | | |
| H5S20-62A7A | Ab_167 | H5S20-62AH | H5S20-7AL | | | | | |
| H5S20-8A8A | Ab_168 | H5S20-8AH | H5S20-8AL | | | | | |
| H5S14-17A16A | | H5S14-17AH | H5S14-16AL | | | | | |
| H5S14-20A18A | | H5S14-20AH | H5S14-18AL | | | | | |
| H5S14-25A16A | | H5S14-25AH | H5S14-16AL | | | | | |
| H5S14-26A22A | | H5S14-26AH | H5S14-22AL | | | | | |
| H5S14-28A24A | | H5S14-28AH | H5S14-24AL | | | | | |
| H5S19-11A15A | | H5S19-11AH | H5S19-15AL | | | | | |
| H5S19-19A18A | | H5S19-19AH | H5S19-18AL | | | | | |
| H5S19-3A3A | | H5S19-3AH | H5S19-3AL | | | | | |
| H5S19-3B14A | | H5S19-3BH | H5S19-14AL | | | | | |
| H5S19-3B3A | | H5S19-3BH | H5S19-3AL | | | | | |
| H5S19-3B4A | | H5S19-3BH | H5S19-4AL | | | | | |
| H5S19-8A10A | | H5S19-8AH | H5S19-10AL | | | | | |
| ITI_021 | | ITI_21H | ITI_21L | | | | | |
| ITI_023 | | ITI_23H | ITI_23L | | | | | |
| ITI_027 | | | ITI_27L | | | | | |
| ITI_028 | | | ITI_28L | | | | | |
| ITI_029 | | | ITI_29L | | | | | |
| ITI_030 | | | ITI_30L | | | | | |
| ITI_032 | | ITI_32H | | | | | | |
| ITI_033 | | | ITI_33L | | | | | |
| ITI_035 | | ITI_35H | | | | | | |
| ITI_038 | | | ITI_38L | | | | | |
| ITI_040 | | ITI_40H | ITI_40L | | | | | |
| ITI_045 | | ITI_45H | ITI_45L | | | | | |
| ITI_046 | | ITI_46H | | | | | | |
| ITI_047 | | ITI_47H | ITI_47L | | | | | |
| ITI_053 | | ITI_53H | | | | | | |
| ITI_082 | | ITI_82H | ITI_82L | | | | | |
| ITI_083 | | ITI_83H | ITI_83L | | | | | |
| ITI_091 | | ITI_91H | ITI_91L | | | | | |
| ITI_100 | | ITI_100H | | | | | | |
| ITI_101 | | ITI_101H | | | | | | |
| ITI_122 | | ITI_122H | ITI_122L | | | | | |
| ITI_127 | | ITI_127H | ITI_127L | | | | | |
| ITI_128 | | ITI_128H | ITI_128L | | | | | |
| ITI_130 | | ITI_130H | | | | | | |
| ITI_131 | | ITI_131H | ITI_131L | | | | | |
| ITI_144 | | ITI_144H | ITI_144L | | | | | |
| ITI_145 | | ITI_145H | ITI_145L | | | | | |
| ITI_146 | | ITI_146H | ITI_146L | | | | | |
| ITI_162 | | ITI_162H | ITI_162L | | | | | |
| ITI_164 | | ITI_164H | | | | | | |
| ITI_165 | | ITI_165H | | | | | | |
| ITI_166 | | | ITI_166L | | | | | |
| ITI_168 | | ITI_168H | | | | | | |
| ITI_169 | | | ITI_169L | | | | | |
| ITI_173 | | ITI_173H | ITI_173L | | | | | |
| ITI_180 | | ITI_180H | | | | | | |
| ITI_200 | | ITI_200H | ITI_200L | | | | | |
| ITI_203 | | ITI_203H | ITI_203L | | | | | |
| ITI_236 | | ITI_236H | ITI_236L | | | | | |
| ITI_237 | | ITI_237H | ITI_237L | | | | | |
| ITI_238 | | ITI_238H | | | | | | |
| ITI_240 | | ITI_240H | ITI_240L | | | | | |

TABLE 2

| | | | | | | | | | | | | | | |
|---|---|---|---|---|---|---|---|---|---|---|---|---|---|---|
| Sequence | | Seq. | | Seq. | | Seq. | | Seq. | | Seq. | | Seq. | | Seq. |
| name | FR1 | ID | CDR1 | ID | FR2 | ID | CDR2 | ID | FR3 | ID | CDR3 | ID | FR4 ID | ID |

Consensus Cluster #11

| | | | | | | | | | [K/N/I/ | | | | | |
|---|---|---|---|---|---|---|---|---|---|---|---|---|---|---|
| | | | | | | | | | M]YNE[N | | | | | |
| | | | | | | | | | /K]F[K/ | | | | | |
| | | | | | | | | | R]GKA[T | | | | | |
| | | | | | | | | | /I]L[T/ | | | | | |
| | | | | | | | | | S][A/V/ | | | | | |
| | | | | | | | | | I]D[T/S | | | | | |
| | | | | | | | | | ]S[S/A] | | | | | |
| | | | | | | | | | [S/N/T] | | | | | |
| | QVQLQQS | | | | | | | | TAY[M/I | | | | | |
| | G[A/T]E | | G[Y/F/N | | | | | | ]QL[S/N | | | | | |
| | [L/V][V | | ][T/R/A | | LGW[V/I | | | | /G][R/S | | [V/A/I] | | | |
| | /I]RPGT | | /I/S][L | | ][K/R][ | | | | /G]LTS[ | | GA[V/M/ | | | |
| | SV[R/K/ | | /F][T/I | | Q/L][R/ | | [I/V]YP | | E/G]DS[ | | L][A/D] | | WGQGT[S | |
| | Q/M][I/ | | ]N[S/Y] | | W]PGHGL | | GGGY[T/ | | G/A]VYF | | [Y/N/H/ | | /A]V[T/ | |
| | M]SCKAS | 202 | W | 285 | EWIGD | 377 | N/I/A] | 464 | C | 561 | S/K] | 709 | I]VSS | 847 |
| H5S14- | QVQLQQS | 203 | GNIFTNS | 286 | LGWIKQR | 378 | VYPGGGY | 465 | KYNEKFK | 562 | AGAMDY | 710 | WGQGTSV | 848 |
| 12AH | GAELVRP | | W | | PGHGLEW | | N | | GKATLTI | | | | TVSS | |
| | GTSVKIS | | | | IGD | | | | DTSASTA | | | | | |
| | CKAS | | | | | | | | YMQLSRL | | | | | |
| | | | | | | | | | TSEDSGV | | | | | |
| | | | | | | | | | YFC | | | | | |
| H5S14- | QVQLQQS | 203 | GYIFTNS | 287 | LGWIKQR | 378 | VYPGGGY | 465 | KYNEKFK | 563 | AGAMDY | 710 | WGQGTSV | 848 |
| 13AH | GAELVRP | | W | | PGHGLEW | | N | | GKATLTI | | | | TVSS | |
| | GTSVKIS | | | | IGD | | | | DTSASTA | | | | | |
| | CKAS | | | | | | | | YMQLSRL | | | | | |
| | | | | | | | | | TSEDSAV | | | | | |
| | | | | | | | | | YFC | | | | | |
| H5S14- | QVQLQQS | 203 | GYIFTNY | 288 | LGWIKQR | 378 | VYPGGGY | 465 | KYNEKFK | 564 | AGAMDY | 710 | WGQGTSV | 848 |
| 14AH | GAELVRP | | W | | PGHGLEW | | N | | GKATLTV | | | | TVSS | |
| | GTSVKIS | | | | IGD | | | | DTSASTA | | | | | |
| | CKAS | | | | | | | | YMQLSRL | | | | | |
| | | | | | | | | | TSEDSAV | | | | | |
| | | | | | | | | | YFC | | | | | |
| H5S14- | QVQLQQS | 203 | GYTFTNS | 289 | LGWVKQR | 379 | IYPGGGY | 466 | KYNEKFK | 565 | AGAMDS | 711 | WGQGTSV | 848 |
| 19AH | GAELVRP | | W | | PGHGLEW | | N | | GKATLTA | | | | TVSS | |
| | GTSVKIS | | | | IGD | | | | DTSSSTA | | | | | |
| | CKAS | | | | | | | | YMQLSSL | | | | | |
| | | | | | | | | | TSEDSAV | | | | | |
| | | | | | | | | | YFC | | | | | |
| H5S15- | QVQLQQS | 203 | GYAFTNS | 290 | LGWVKQR | 379 | IYPGGGY | 466 | KYNEKFK | 565 | AGALDY | 712 | WGQGTSV | 848 |
| 31AH | GAELVRP | | W | | PGHGLEW | | N | | GKATLTA | | | | TVSS | |
| | GTSVKIS | | | | IGD | | | | DTSSSTA | | | | | |
| | CKAS | | | | | | | | YMQLSSL | | | | | |
| | | | | | | | | | TSEDSAV | | | | | |
| | | | | | | | | | YFC | | | | | |
| H5S15- | QVQLQQS | 203 | GYTFTNS | 289 | LGWVKQR | 379 | IYPGGGY | 466 | KYNEKFK | 566 | AGAMDY | 710 | WGQGTSV | 848 |
| 35AH | GAELVRP | | W | | PGHGLEW | | N | | GKATLTA | | | | TVSS | |
| | GTSVKIS | | | | IGD | | | | DTSSSTA | | | | | |
| | CKAS | | | | | | | | YMQLGSL | | | | | |
| | | | | | | | | | TSEDSAV | | | | | |
| | | | | | | | | | YFC | | | | | |
| H5S20- | QVQLQQS | 203 | GYTLINS | 291 | LGWVKQR | 379 | IYPGGGY | 466 | KYNEKFK | 567 | AGAMDY | 710 | WGQGTSV | 848 |
| 23AH | GAELVRP | | W | | PGHGLEW | | N | | GKAILTA | | | | TVSS | |
| | GTSVKIS | | | | IGD | | | | DTSSSTA | | | | | |
| | CKAS | | | | | | | | YMQLSSL | | | | | |
| | | | | | | | | | TSEDSAV | | | | | |
| | | | | | | | | | YFC | | | | | |
| H5S20- | QVQLQQS | 203 | GYTFTNY | 292 | LGWVKQR | 379 | IYPGGGY | 467 | IYNEKFK | 568 | AGAMDH | 713 | WGQGTSV | 848 |
| 24AH | GAELVRP | | W | | PGHGLEW | | I | | GKATLTV | | | | TVSS | |
| | GTSVKIS | | | | IGD | | | | DSSATTA | | | | | |
| | CKAS | | | | | | | | YIQLNSL | | | | | |
| | | | | | | | | | TSEDSAV | | | | | |
| | | | | | | | | | YFC | | | | | |
| H5S20- | QVQLQQS | 204 | GFTLTNY | 293 | LGWVKQR | 379 | IYPGGGY | 468 | NYNEKFK | 569 | AGAMDK | 714 | WGQGTSV | 848 |
| 28AH | GAEVVRP | | W | | PGHGLEW | | T | | GKATLTA | | | | TVSS | |
| | GTSVQIS | | | | IGD | | | | DTSSNTA | | | | | |
| | CKAS | | | | | | | | YMQLSGL | | | | | |
| | | | | | | | | | TSEDSAV | | | | | |
| | | | | | | | | | YFC | | | | | |
| H5S20- | QVQLQQS | 205 | GFTLTNY | 293 | LGWVKQR | 379 | IYPGGGY | 468 | NYNEKFK | 569 | AGAMDK | 714 | WGQGTSV | 848 |
| 28BH | GAEVVRP | | W | | PGHGLEW | | T | | GKATLTA | | | | TVSS | |
| | GTSVKIS | | | | IGD | | | | DTSSNTA | | | | | |
| | CKAS | | | | | | | | YMQLSGL | | | | | |
| | | | | | | | | | TSEDSAV | | | | | |
| | | | | | | | | | YFC | | | | | |
| H5S20- | QVQLQQS | 206 | GFTLTNY | 293 | LGWVKQR | 379 | IYPGGGY | 469 | NYNEKFK | 569 | AGAMDK | 714 | WGQGTSV | 848 |
| 30AH | GTEVVRP | | W | | PGHGLEW | | A | | GKATLTA | | | | TVSS | |
| | GTSVKIS | | | | IGD | | | | DTSSNTA | | | | | |
| | CKAS | | | | | | | | YMQLSGL | | | | | |
| | | | | | | | | | TSEDSAV | | | | | |
| | | | | | | | | | YFC | | | | | |
| H5S20- | QVQLQQS | 203 | GYTFTNY | 292 | LGWVKQW | 380 | IYPGGGY | 466 | IYNEKFK | 570 | AGAMDY | 710 | WGQGTSV | 848 |
| 32AH | GAELVRP | | W | | PGHGLEW | | N | | GKATLTV | | | | TVSS | |
| | GTSVKIS | | | | IGD | | | | DTSSSTA | | | | | |
| | CKAS | | | | | | | | YMQLSSL | | | | | |
| | | | | | | | | | TSEDSAV | | | | | |
| | | | | | | | | | YFC | | | | | |
| H5S20- | QVQLQQS | 203 | GYTFTNY | 292 | LGWVKQR | 379 | IYPGGGY | 466 | IYNEKFK | 570 | AGAMDY | 710 | WGQGTSV | 848 |
| 32BH | GAELVRP | | W | | PGHGLEW | | N | | GKATLTV | | | | TVSS | |
| | GTSVKIS | | | | IGD | | | | DTSSSTA | | | | | |
| | CKAS | | | | | | | | YMQLSSL | | | | | |
| | | | | | | | | | TSEDSAV | | | | | |
| | | | | | | | | | YFC | | | | | |
| H5S20- | QVQLQQS | 203 | GYTFTNY | 292 | LGWVKQR | 379 | IYPGGGY | 466 | IYNEKFK | 571 | AGAMDY | 710 | WGQGTSV | 848 |
| 32CH | GAELVRP | | W | | PGHGLEW | | N | | GKATLTI | | | | TVSS | |
| | GTSVKIS | | | | IGD | | | | DTSSSTA | | | | | |
| | CKAS | | | | | | | | YMQLSSL | | | | | |
| | | | | | | | | | TSEDSAV | | | | | |
| | | | | | | | | | YFC | | | | | |
| H5S20- | QVQLQQS | 207 | GYTLTNS | 294 | LGWVKQR | 379 | IYPGGGY | 468 | KYNENFK | 572 | VGAVAY | 715 | WGQGTSV | 848 |
| 33AH | GAELVRP | | W | | PGHGLEW | | T | | GKATLTA | | | | TVSS | |
| | GTSVRIS | | | | IGD | | | | DTSSSTA | | | | | |
| | CKAS | | | | | | | | YMQLSRL | | | | | |
| | | | | | | | | | TSEDSGV | | | | | |
| | | | | | | | | | YFC | | | | | |
| H5S20- | QVQLQQS | 203 | GYTFTNY | 292 | LGWVKQR | 379 | IYPGGGY | 466 | KYNEKFK | 565 | AGAMDY | 710 | WGQGTSV | 848 |
| 35AH | GAELVRP | | W | | PGHGLEW | | N | | GKATLTA | | | | TVSS | |
| | GTSVKIS | | | | IGD | | | | DTSSSTA | | | | | |
| | CKAS | | | | | | | | YMQLSSL | | | | | |
| | | | | | | | | | TSEDSAV | | | | | |
| | | | | | | | | | YFC | | | | | |
| H5S20- | QVQLQQS | 208 | GYTFTNS | 289 | LGWVKQR | 379 | IYPGGGY | 467 | KYNEKFK | 565 | AGAMDY | 710 | WGQGTSV | 848 |
| 36AH | GAELVRP | | W | | PGHGLEW | | I | | GKATLTA | | | | TVSS | |
| | GTSVKMS | | | | IGD | | | | DTSSSTA | | | | | |
| | CKAS | | | | | | | | YMQLSSL | | | | | |
| | | | | | | | | | TSEDSAV | | | | | |
| | | | | | | | | | YFC | | | | | |
| H5S20- | QVQLQQS | 207 | GYTLTNS | 294 | LGWVKQR | 379 | IYPGGGY | 468 | KYNEKFK | 565 | AGAVAY | 716 | WGQGTSV | 848 |
| 38AH | GAELVRP | | W | | PGHGLEW | | T | | GKATLTA | | | | TVSS | |
| | GTSVRIS | | | | IGD | | | | DTSSSTA | | | | | |
| | CKAS | | | | | | | | YMQLSSL | | | | | |
| | | | | | | | | | TSEDSAV | | | | | |
| | | | | | | | | | YFC | | | | | |
| H5S20- | QVQLQQS | 203 | GYTFTNS | 289 | LGWVKQR | 379 | IYPGGGY | 466 | KYNEKFR | 573 | AGAMDY | 710 | WGQGTSV | 848 |
| 3BH | GAELVRP | | W | | PGHGLEW | | N | | GKATLTA | | | | TVSS | |
| | GTSVKIS | | | | IGD | | | | DTSSSTA | | | | | |
| | CKAS | | | | | | | | YMQLSSL | | | | | |
| | | | | | | | | | TSEDSAV | | | | | |
| | | | | | | | | | YFC | | | | | |
| H5S20- | QVQLQQS | 203 | GYTFTNS | 289 | LGWVKQR | 379 | IYPGGGY | 466 | KYNEKFK | 565 | AGAMDY | 710 | WGQGTSV | 848 |
| 3CH | GAELVRP | | W | | PGHGLEW | | N | | GKATLTA | | | | TVSS | |
| | GTSVKIS | | | | IGD | | | | DTSSSTA | | | | | |
| | CKAS | | | | | | | | YMQLSSL | | | | | |
| | | | | | | | | | TSEDSAV | | | | | |
| | | | | | | | | | YFC | | | | | |
| H5S20- | QVQLQQS | 203 | GYRFTNY | 295 | LGWVKQR | 379 | IYPGGGY | 466 | KYNEKFK | 565 | AGAMDY | 710 | WGQGTSV | 848 |
| 41AH | GAELVRP | | W | | PGHGLEW | | N | | GKATLTA | | | | TVSS | |
| | GTSVKIS | | | | IGD | | | | DTSSSTA | | | | | |
| | CKAS | | | | | | | | YMQLSSL | | | | | |
| | | | | | | | | | TSEDSAV | | | | | |
| | | | | | | | | | YFC | | | | | |
| H5S20- | QVQLQQS | 203 | GYRFTNY | 295 | LGWIKQR | 378 | IYPGGGY | 466 | KYNEKFK | 565 | AGAMDY | 710 | WGQGTSV | 849 |
| 41BH | GAELVRP | | W | | PGHGLEW | | N | | GKATLTA | | | | IVSS | |
| | GTSVKIS | | | | IGD | | | | DTSSSTA | | | | | |
| | CKAS | | | | | | | | YMQLSSL | | | | | |
| | | | | | | | | | TSEDSAV | | | | | |
| | | | | | | | | | YFC | | | | | |
| H5S20- | QVQLQQS | 209 | GYTFTNY | 292 | LGWVKQR | 379 | IYPGGGY | 467 | IYNEKFK | 574 | AGAMDY | 710 | WGQGTSV | 848 |
| 43AH | GAELVRP | | W | | PGHGLEW | | I | | GKATLTV | | | | TVSS | |
| | GTSVMIS | | | | IGD | | | | DSSATTA | | | | | |
| | CKAS | | | | | | | | YMQLSSL | | | | | |
| | | | | | | | | | TSEDSAV | | | | | |
| | | | | | | | | | YFC | | | | | |
| H5S20- | QVQLQQS | 207 | GYTLTNS | 294 | LGWVKQR | 379 | IYPGGGY | 466 | KYNEKFK | 565 | AGAVAY | 716 | WGQGTSV | 848 |
| 48AH | GAELVRP | | W | | PGHGLEW | | N | | GKATLTA | | | | TVSS | |
| | GTSVRIS | | | | IGD | | | | DTSSSTA | | | | | |
| | CKAS | | | | | | | | YMQLSSL | | | | | |
| | | | | | | | | | TSEDSAV | | | | | |
| | | | | | | | | | YFC | | | | | |
| H5S20- | QVQLQQS | 203 | GYRFTNS | 296 | LGWVKQR | 379 | IYPGGGY | 466 | KYNEKFK | 575 | AGALDY | 712 | WGQGTSV | 848 |
| 50AH | GAELVRP | | W | | PGHGLEW | | N | | GKATLTA | | | | TVSS | |
| | GTSVKIS | | | | IGD | | | | DTSSNTA | | | | | |
| | CKAS | | | | | | | | YMQLSSL | | | | | |
| | | | | | | | | | TSEDSAV | | | | | |
| | | | | | | | | | YFC | | | | | |
| H5S20- | QVQLQQS | 205 | GFTLTNY | 293 | LGWVKQR | 379 | IYPGGGY | 468 | NYNEKFK | 569 | AGAMDN | 717 | WGQGTSV | 848 |
| 54AH | GAEVVRP | | W | | PGHGLEW | | T | | GKATLTA | | | | TVSS | |
| | GTSVKIS | | | | IGD | | | | DTSSNTA | | | | | |
| | CKAS | | | | | | | | YMQLSGL | | | | | |
| | | | | | | | | | TSEDSAV | | | | | |
| | | | | | | | | | YFC | | | | | |
| H5S20- | QVQLQQS | 203 | GYTFTNS | 289 | LGWVKQR | 379 | IYPGGGY | 466 | KYNEKFK | 565 | IGAMDY | 718 | WGQGTSV | 848 |
| 57AH | GAELVRP | | W | | PGHGLEW | | N | | GKATLTA | | | | TVSS | |
| | GTSVKIS | | | | IGD | | | | DTSSSTA | | | | | |
| | CKAS | | | | | | | | YMQLSSL | | | | | |
| | | | | | | | | | TSEDSAV | | | | | |
| | | | | | | | | | YFC | | | | | |
| H5S20- | QVQLQQS | 207 | GYTLTNS | 294 | LGWVKQR | 379 | IYPGGGY | 468 | KYNENFK | 576 | AGAMAY | 719 | WGQGTSV | 848 |
| 60AH | GAELVRP | | W | | PGHGLEW | | T | | GKATLSA | | | | TVSS | |
| | GTSVRIS | | | | IGD | | | | DTSSSTA | | | | | |
| | CKAS | | | | | | | | YMQLSSL | | | | | |
| | | | | | | | | | TSGDSAV | | | | | |
| | | | | | | | | | YFC | | | | | |
| H5S20- | QVQLQQS | 203 | GYSFTNY | 297 | LGWVKQR | 379 | IYPGGGY | 466 | MYNEKFK | 577 | AGAMDY | 710 | WGQGTSV | 848 |
| 62AH | GAELVRP | | W | | PGHGLEW | | N | | GKATLTV | | | | TVSS | |
| | GTSVKIS | | | | IGD | | | | DTSSSTA | | | | | |
| | CKAS | | | | | | | | YMQLSSL | | | | | |
| | | | | | | | | | TSEDSAV | | | | | |
| | | | | | | | | | YFC | | | | | |
| H5S20- | QVQLQQS | 203 | GYRFTNS | 296 | LGWIKQR | 378 | IYPGGGY | 466 | KYNEKFR | 573 | AGAMDS | 711 | WGQGTSV | 848 |
| 7AH | GAELVRP | | W | | PGHGLEW | | N | | GKATLTA | | | | TVSS | |
| | GTSVKIS | | | | IGD | | | | DTSSSTA | | | | | |
| | CKAS | | | | | | | | YMQLSSL | | | | | |
| | | | | | | | | | TSEDSAV | | | | | |
| | | | | | | | | | YFC | | | | | |
| H5S20- | QVQLQQS | 210 | GYRFTNS | 296 | LGWIKLR | 381 | IYPGGGY | 466 | KYNEKFR | 573 | AGAMDS | 711 | WGQGTSV | 848 |
| 7BH | GAELIRP | | W | | PGHGLEW | | N | | GKATLTA | | | | TVSS | |
| | GTSVKIS | | | | IGD | | | | DTSSSTA | | | | | |
| | CKAS | | | | | | | | YMQLSSL | | | | | |
| | | | | | | | | | TSEDSAV | | | | | |
| | | | | | | | | | YFC | | | | | |
| ITI_ | QVQLQQS | 203 | GYTFTNS | 289 | LGWVKQR | 379 | IYPGGGY | 466 | KYNEKFK | 578 | AGAMDY | 710 | WGQGTAV | 850 |
| 04 | GAELVRP | | W | | PGHGLEW | | N | | GKATLTA | | | | TVSS | |
| 7H | GTSVKIS | | | | IGD | | | | DTSSSTA | | | | | |
| | CKAS | | | | | | | | YMQLSSL | | | | | |
| | | | | | | | | | TSEDSGV | | | | | |
| | | | | | | | | | YFC | | | | | |
| ITI_ | QVQLQQS | 203 | GYAFTNS | 290 | LGWVRQR | 382 | IYPGGGY | 466 | KYNEKFK | 565 | AGALDY | 712 | WGQGTSV | 848 |
| 05 | GAELVRP | | W | | PGHGLEW | | N | | GKATLTA | | | | TVSS | |
| 3H | GTSVKIS | | | | IGD | | | | DTSSSTA | | | | | |
| | CKAS | | | | | | | | YMQLSSL | | | | | |
| | | | | | | | | | TSEDSAV | | | | | |
| | | | | | | | | | YFC | | | | | |
| | | Seq. | | Seq. | | Seq. | | Seq. | | Seq. | | Seq. | | Seq. |
| | FR1 | ID | CDR1 | ID | FR2 | ID | CDR2 | ID | FR3 | ID | CDR3 | ID | FR4 ID | ID |

Consensus Cluster #20

| | | | | | | | | | [F/Y][Y | | | | | |
|---|---|---|---|---|---|---|---|---|---|---|---|---|---|---|
| | | | | | | | | | /S/F][R | | | | | |
| | | | | | | | | | /P/S/A] | | | | | |
| | | | | | | | | | D[S/N/T | | | | | |
| | | | | | | | | | ][V/L]K | | | | | |
| | | | | | | | | | [A/G]RF | | | | | |
| | | | | | | | | | TISRD[D | | | | | |
| | | | | | | | | | /N][V/A | | [T/A]RG | | | |
| | | | | | | | | | /P][R/G | | [G/A][Y | | | |
| | [E/D]V[ | | | | | | | | /K][D/N | | /G]G[-/ | | | |
| | K/Q]LVE | | | | | | I[S/T][ | | ][I/T][ | | N][-/Y/ | | | |
| | SGG[G/D | | | | M[S/H]W | | S/T]G[- | | L/V][Y/ | | F][S/F/ | | | |
| | ]L[V/M] | | | | [V/I]RQ | | /G/S][G | | F]LQM[S | | A][S/W] | | WGQGT[T | |
| | [K/M/Q] | | GFTFS[S | | [T/A]PE | | /T/S][D | | /T]SL[R | | [F/H/Y] | | /L][L/V | |
| | PGGS[L/ | | /N/D][Y | | [T/K][R | | /N/S/K/ | | /K]SEDT | | [V/T/A/ | | ]T[V/I] | |
| | R][K/R] | | /F][A/G | | /G]LEWV | | T][T/S/ | | AMY[F/Y | | P][I/Y/ | | S[S/A/T | |
| | LSCAAS | 211 | ] | 298 | A[S/H] | 383 | I] | 470 | /A]C | 579 | F] | 720 | ] | 851 |
| H5S14- | EVKLVES | 212 | GFTFSSF | 299 | MSWIRQT | 384 | ITTG-GS | 471 | YSPDSLK | 580 | ARGGGGN | 721 | WGQGTLV | 852 |
| 11AH | GGGLVKP | | A | | PEKGLEW | | S | | GRFTISR | | YFWFAY | | TVSA | |
| | GGSLRLS | | | | VAS | | | | DNVRNIV | | | | | |
| | CAAS | | | | | | | | YLQMSSL | | | | | |
| | | | | | | | | | RSEDTAM | | | | | |
| | | | | | | | | | YAC | | | | | |
| H5S14- | EVKLVES | 213 | GFTFSNY | 300 | MSWVRQT | 385 | ISTGGTT | 472 | YYSDSVK | 581 | ARGGGGN | 722 | WGQGTLV | 853 |
| 8AH | GGDLVKP | | A | | PEKRLEW | | S | | GRFTISR | | YFWFTY | | TISA | |
| | GGSLKLS | | | | VAS | | | | DNARNIL | | | | | |
| | CAAS | | | | | | | | YLQMSSL | | | | | |
| | | | | | | | | | RSEDTAM | | | | | |
| | | | | | | | | | YYC | | | | | |
| H5S15- | DVQLVES | 214 | GFTFSSF | 301 | MHWIRQA | 386 | ISSGSST | 473 | YFADTVK | 582 | ARGAYGN | 723 | WGQGTLV | 852 |
| 10AH | GGGLVQP | | G | | PEKGLEW | | I | | GRFTISR | | FAWFPY | | TVSA | |
| | GGSRKLS | | | | VAS | | | | DNPKNTL | | | | | |
| | CAAS | | | | | | | | FLQMTSL | | | | | |
| | | | | | | | | | RSEDTAM | | | | | |
| | | | | | | | | | YYC | | | | | |
| H5S15- | DVQLVES | 214 | GFTFSSF | 301 | MHWVRQA | 387 | ISSGSST | 473 | YYADTVK | 583 | ARGAYGN | 723 | WGQGTLV | 852 |
| 16AH | GGGLVQP | | G | | PEKGLEW | | I | | GRFTISR | | FAWFPY | | TVSA | |
| | GGSRKLS | | | | VAH | | | | DNPKNTL | | | | | |
| | CAAS | | | | | | | | FLQMTSL | | | | | |
| | | | | | | | | | RSEDTAM | | | | | |
| | | | | | | | | | YYC | | | | | |
| H5S15- | DVQLVES | 214 | GFTFSSF | 301 | MHWVRQA | 387 | ISSGSST | 473 | YYADTVK | 583 | ARGAYGN | 723 | WGQGTLV | 854 |
| 16BH | GGGLVQP | | G | | PEKGLEW | | I | | GRFTISR | | FAWFPY | | TVST | |
| | GGSRKLS | | | | VAH | | | | DNPKNTL | | | | | |
| | CAAS | | | | | | | | FLQMTSL | | | | | |
| | | | | | | | | | RSEDTAM | | | | | |
| | | | | | | | | | YYC | | | | | |
| H5S15- | DVQLVES | 214 | GFTFSSF | 301 | MHWVRQA | 388 | ISSGSST | 473 | YYADTVK | 583 | ARGAYGN | 724 | WGQGTLV | 852 |
| 20AH | GGGLVQP | | G | | PEKGLEW | | I | | GRFTISR | | FAWFAF | | TVSA | |
| | GGSRKLS | | | | VAS | | | | DNPKNTL | | | | | |
| | CAAS | | | | | | | | FLQMTSL | | | | | |
| | | | | | | | | | RSEDTAM | | | | | |
| | | | | | | | | | YYC | | | | | |
| H5S15- | DVQLVES | 214 | GFTFSDF | 302 | MHWVRQA | 387 | ISSGSST | 473 | YYADTVK | 583 | ARGAYGN | 723 | WGQGTLV | 852 |
| 9AH | GGGLVQP | | G | | PEKGLEW | | I | | GRFTISR | | FAWFPY | | TVSA | |
| | GGSRKLS | | | | VAH | | | | DNPKNTL | | | | | |
| | CAAS | | | | | | | | FLQMTSL | | | | | |
| | | | | | | | | | RSEDTAM | | | | | |
| | | | | | | | | | YYC | | | | | |
| H5S20- | EVKLVES | 215 | GFTFSSY | 303 | MSWVRQT | 389 | ISSG-GN | 474 | FYPDSVK | 584 | TRGGYG- | 725 | WGQGTTV | 855 |
| 11AH | GGGLVKP | | A | | PETRLEW | | T | | GRFTISR | | -SSYVI | | TVSS | |
| | GGSLKLS | | | | VAS | | | | DNVRDIL | | | | | |
| | CAAS | | | | | | | | YLQMSSL | | | | | |
| | | | | | | | | | RSEDTAM | | | | | |
| | | | | | | | | | YFC | | | | | |
| H5S20- | EVKLVES | 215 | GFTFSSY | 303 | MSWVRQT | 389 | ISSG-GN | 474 | FYPDSVK | 584 | TRGGYG- | 725 | WGQGTTL | 856 |
| 11BH | GGGLVKP | | A | | PETRLEW | | T | | GRFTISR | | -SSYVI | | TVSS | |
| | GGSLKLS | | | | VAS | | | | DNVRDIL | | | | | |
| | CAAS | | | | | | | | YLQMSSL | | | | | |
| | | | | | | | | | RSEDTAM | | | | | |
| | | | | | | | | | YFC | | | | | |
| H5S20- | EVKLVES | 215 | GFTFSSY | 303 | MSWVRQT | 389 | ISSG-GN | 474 | FYPDSVK | 585 | TRGGYG- | 725 | WGQGTTL | 856 |
| 11CH | GGGLVKP | | A | | PETRLEW | | T | | GRFTISR | | -SSYVI | | TVSS | |
| | GGSLKLS | | | | VAS | | | | DDVRDIL | | | | | |
| | CAAS | | | | | | | | YLQMSSL | | | | | |
| | | | | | | | | | RSEDTAM | | | | | |
| | | | | | | | | | YFC | | | | | |
| H5S20- | EVKLVES | 215 | GFTFSSY | 303 | MSWVRQT | 389 | ISSG-GN | 474 | YYPDSVK | 586 | TRGGYG- | 725 | WGQGTTL | 856 |
| 14AH | GGGLVKP | | A | | PETRLEW | | T | | GRFTISR | | -SSYVI | | TVSS | |
| | GGSLKLS | | | | VAS | | | | DNVRNIL | | | | | |
| | CAAS | | | | | | | | YLQMSSL | | | | | |
| | | | | | | | | | RSEDTAM | | | | | |
| | | | | | | | | | YFC | | | | | |
| H5S20- | EVKLVES | 215 | GFTFSSY | 303 | MSWVRQT | 389 | ISSG-GN | 474 | YYPDSVK | 587 | TRGGYG- | 725 | WGQGTTL | 856 |
| 14BH | GGGLVKP | | A | | PETRLEW | | T | | GRFTISR | | -SSYVI | | TVSS | |
| | GGSLKLS | | | | VAS | | | | DDVRNIL | | | | | |
| | CAAS | | | | | | | | YLQMSSL | | | | | |
| | | | | | | | | | RSEDTAM | | | | | |
| | | | | | | | | | YFC | | | | | |
| H5S20- | EVKLVES | 215 | GFTFSSY | 303 | MSWVRQT | 389 | ISSG-GN | 474 | YYPDSVK | 588 | TRGGYG- | 725 | WGQGTTL | 856 |
| 14CH | GGGLVKP | | A | | PETRLEW | | T | | GRFTISR | | -SSYVI | | TVSS | |
| | GGSLKLS | | | | VAS | | | | DNVRDIL | | | | | |
| | CAAS | | | | | | | | YLQMSSL | | | | | |
| | | | | | | | | | KSEDTAM | | | | | |
| | | | | | | | | | YFC | | | | | |
| H5S20- | EVKLVES | 216 | GFTFSSY | 303 | MSWVRQT | 389 | ISSG-GN | 474 | YYPDSVK | 586 | TRGGYG- | 725 | WGQGTTL | 856 |
| 14DH | GGGLVMP | | A | | PETRLEW | | T | | GRFTISR | | -SSYVI | | TVSS | |
| | GGSLKLS | | | | VAS | | | | DNVRNIL | | | | | |
| | CAAS | | | | | | | | YLQMSSL | | | | | |
| | | | | | | | | | RSEDTAM | | | | | |
| | | | | | | | | | YFC | | | | | |
| H5S20- | EVKLVES | 215 | GFTFSSY | 303 | MSWVRQT | 389 | ISSG-GD | 475 | FYRDSVK | 589 | TRGGYG- | 726 | WGQGTTL | 856 |
| 1AH | GGGLVKP | | A | | PETRLEW | | T | | ARFTISR | | -SSFVI | | TVSS | |
| | GGSLKLS | | | | VAS | | | | DDVRDIL | | | | | |
| | CAAS | | | | | | | | YLQMSSL | | | | | |
| | | | | | | | | | RSEDTAM | | | | | |
| | | | | | | | | | YFC | | | | | |
| H5S20- | EVKLVES | 215 | GFTFSSY | 303 | MSWVRQT | 389 | ISSG-GN | 474 | FYPDSVK | 585 | TRGGYG- | 726 | WGQGTTL | 856 |
| 29AH | GGGLVKP | | A | | PETRLEW | | T | | GRFTISR | | -SSFVI | | TVSS | |
| | GGSLKLS | | | | VAS | | | | DDVRDIL | | | | | |
| | CAAS | | | | | | | | YLQMSSL | | | | | |
| | | | | | | | | | RSEDTAM | | | | | |
| | | | | | | | | | YFC | | | | | |
| H5S20- | EVKLVES | 215 | GFTFSSY | 303 | MSWVRQT | 389 | ISSG-GK | 476 | FYPDSVK | 584 | TRGGYG- | 725 | WGQGTTL | 856 |
| 37AH | GGGLVKP | | A | | PETRLEW | | T | | GRFTISR | | -SSYVI | | TVSS | |
| | GGSLKLS | | | | VAS | | | | DNVRDIL | | | | | |
| | CAAS | | | | | | | | YLQMSSL | | | | | |
| | | | | | | | | | RSEDTAM | | | | | |
| | | | | | | | | | YFC | | | | | |
| H5S20- | EVKLVES | 215 | GFTFSSY | 303 | MSWVRQT | 389 | ISSG-GN | 474 | YYPDSVK | 586 | TRGGYG- | 727 | WGQGTTL | 856 |
| 39AH | GGGLVKP | | A | | PETRLEW | | T | | GRFTISR | | -SSHVI | | TVSS | |
| | GGSLKLS | | | | VAS | | | | DNVRNIL | | | | | |
| | CAAS | | | | | | | | YLQMSSL | | | | | |
| | | | | | | | | | RSEDTAM | | | | | |
| | | | | | | | | | YFC | | | | | |
| H5S20- | EVKLVES | 215 | GFTFSNY | 300 | MSWVRQT | 389 | ISSG-GN | 474 | YYPDSVK | 586 | TRGGYG- | 725 | WGQGTTL | 856 |
| 40AH | GGGLVKP | | A | | PETRLEW | | T | | GRFTISR | | -SSYVI | | TVSS | |
| | GGSLKLS | | | | VAS | | | | DNVRNIL | | | | | |
| | CAAS | | | | | | | | YLQMSSL | | | | | |
| | | | | | | | | | RSEDTAM | | | | | |
| | | | | | | | | | YFC | | | | | |
| H5S20- | EVKLVES | 217 | GFTFSSY | 303 | MSWVRQT | 389 | ISSG-GS | 477 | YYPDSVK | 586 | TRGGYG- | 725 | WGQGTTL | 856 |
| 4AH | GGGLMKP | | A | | PETRLEW | | T | | GRFTISR | | -SSYVI | | TVSS | |
| | GGSLKLS | | | | VAS | | | | DNVRNIL | | | | | |
| | CAAS | | | | | | | | YLQMSSL | | | | | |
| | | | | | | | | | RSEDTAM | | | | | |
| | | | | | | | | | YFC | | | | | |
| H5S20- | EVKLVES | 215 | GFTFSSY | 303 | MSWVRQT | 389 | ISSG-GS | 477 | YYPDSVK | 586 | TRGGYG- | 725 | WGQGTTL | 856 |
| 4BH | GGGLVKP | | A | | PETRLEW | | T | | GRFTISR | | -SSYVI | | TVSS | |
| | GGSLKLS | | | | VAS | | | | DNVRNIL | | | | | |
| | CAAS | | | | | | | | YLQMSSL | | | | | |
| | | | | | | | | | RSEDTAM | | | | | |
| | | | | | | | | | YFC | | | | | |
| H5S20- | EVKLVES | 215 | GFTFSSY | 303 | MSWVRQT | 389 | ISSG-GS | 477 | YYPDSVK | 586 | TRGGYG- | 727 | WGQGTTL | 856 |
| 61AH | GGGLVKP | | A | | PETRLEW | | T | | GRFTISR | | -SSHVI | | TVSS | |
| | GGSLKLS | | | | VAS | | | | DNVRNIL | | | | | |
| | CAAS | | | | | | | | YLQMSSL | | | | | |
| | | | | | | | | | RSEDTAM | | | | | |
| | | | | | | | | | YFC | | | | | |
| H5S20- | EVKLVES | 215 | GFTFSSF | 299 | MSWVRQT | 385 | ISSG-GN | 474 | YYPDNVK | 590 | ARGGYG- | 728 | WGQGTTL | 856 |
| 6AH | GGGLVKP | | A | | PEKRLEW | | T | | GRFTISR | | -SSYVI | | TVSS | |
| | GGSLKLS | | | | VAS | | | | DNAGNIL | | | | | |
| | CAAS | | | | | | | | YLQMSSL | | | | | |
| | | | | | | | | | RSEDTAM | | | | | |
| | | | | | | | | | YYC | | | | | |
| | | Seq. | | Seq. | | Seq. | | Seq. | | Seq. | | Seq. | | Seq. |
| | FR1 | ID | CDR1 | ID | FR2 | ID | CDR2 | ID | FR3 | ID | CDR3 | ID | FR4 ID | ID |

Consensus Cluster #5

| | | | | | | | | | [N/S]YN | | | | | |
|---|---|---|---|---|---|---|---|---|---|---|---|---|---|---|
| | | | | | | | | | SALMSRL | | | | | |
| | | | | | | | | | [S/N/T] | | | | | |
| | [Q/G][V | | | | | | | | I[S/N/T | | | | | |
| | /A][Q/A | | | | | | | | /I][K/N | | | | | |
| | ][L/E][ | | | | | | | | /Q/I/T/ | | | | | |
| | K/G][E/ | | | | | | | | S]DN[S/ | | | | | |
| | V][S/R] | | | | | | | | F][K/R] | | | | | |
| | [G/R]P[ | | | | V[H/Y]W | | | | SQVFLKM | | | | | |
| | G/V]LVA | | | | [V/L]RQ | | | | NSLQ[S/ | | | | | |
| | PS[Q/R] | | GFSL[T/ | | P[P/A]G | | | | T][D/G] | | ARDWERD | | | |
| | [S/N]LS | | S][I/T/ | | KGLEWLG | | IWAGGI[ | | DTA[M/I | | SSGPF[A | | WGQGTLV | |
| | ITCTVS | 218 | S/N]YG | 304 | V | 390 | I/T] | 478 | ]YYC | 591 | /V/P]Y | 729 | TVSA | 852 |
| H5S19- | QVQLKES | 219 | GFSLTTY | 305 | VHWVRQP | 391 | IWAGGIT | 479 | NYNSALM | 592 | ARDWERD | 730 | WGQGTLV | 852 |
| 12BH | GPGLVAP | | G | | PGKGLEW | | | | SRLTISN | | SSGPFPY | | TVSA | |
| | SRSLSIT | | | | LGV | | | | DNSRSQV | | | | | |
| | CTVS | | | | | | | | FLKMNSL | | | | | |
| | | | | | | | | | QTDDTAM | | | | | |
| | | | | | | | | | YYC | | | | | |
| H5S19- | QVQLKES | 219 | GFSLTTY | 305 | VHWVRQP | 391 | IWAGGIT | 479 | NYNSALM | 593 | ARDWERD | 730 | WGQGTLV | 852 |
| 12CH | GPGLVAP | | G | | PGKGLEW | | | | SRLSISN | | SSGPFPY | | TVSA | |
| | SRSLSIT | | | | LGV | | | | DNSRSQV | | | | | |
| | CTVS | | | | | | | | FLKMNSL | | | | | |
| | | | | | | | | | QTDDTAM | | | | | |
| | | | | | | | | | YYC | | | | | |
| H5S19- | QVQLKES | 220 | GFSLTSY | 306 | VHWVRQP | 391 | IWAGGIT | 479 | NYNSALM | 593 | ARDWERD | 731 | WGQGTLV | 852 |
| 14AH | GPGLVAP | | G | | PGKGLEW | | | | SRLSISN | | SSGPFAY | | TVSA | |
| | SQSLSIT | | | | LGV | | | | DNSRSQV | | | | | |
| | CTVS | | | | | | | | FLKMNSL | | | | | |
| | | | | | | | | | QTDDTAM | | | | | |
| | | | | | | | | | YYC | | | | | |
| H5S19- | QVQLKES | 220 | GFSLTSY | 306 | VHWVRQP | 391 | IWAGGIT | 479 | NYNSALM | 594 | ARDWERD | 731 | WGQGTLV | 852 |
| 14BH | GPGLVAP | | G | | PGKGLEW | | | | SRLSINN | | SSGPFAY | | TVSA | |
| | SQSLSIT | | | | LGV | | | | DNSRSQV | | | | | |
| | CTVS | | | | | | | | FLKMNSL | | | | | |
| | | | | | | | | | QTDDTAM | | | | | |
| | | | | | | | | | YYC | | | | | |
| H5S19- | QVQLKES | 220 | GFSLTTY | 305 | VHWVRQP | 391 | IWAGGIT | 479 | NYNSALM | 595 | ARDWERD | 731 | WGQGTLV | 852 |
| 17AH | GPGLVAP | | G | | PGKGLEW | | | | SRLSISK | | SSGPFAY | | TVSA | |
| | SQSLSIT | | | | LGV | | | | DNSKSQV | | | | | |
| | CTVS | | | | | | | | FLKMNSL | | | | | |
| | | | | | | | | | QTGDTAM | | | | | |
| | | | | | | | | | YYC | | | | | |
| H5S19- | QVQLKES | 220 | GFSLTIY | 307 | VHWVRQP | 391 | IWAGGII | 480 | NYNSALM | 596 | ARDWERD | 731 | WGQGTLV | 852 |
| 18AH | GPGLVAP | | G | | PGKGLEW | | | | SRLSISK | | SSGPFAY | | TVSA | |
| | SQSLSIT | | | | LGV | | | | DNSKSQV | | | | | |
| | CTVS | | | | | | | | FLKMNSL | | | | | |
| | | | | | | | | | QSDDTAM | | | | | |
| | | | | | | | | | YYC | | | | | |
| H5S19- | QVQLKES | 220 | GFSLTSY | 306 | VHWVRQP | 391 | IWAGGIT | 479 | NYNSALM | 597 | ARDWERD | 732 | WGQGTLV | 852 |
| 20AH | GPGLVAP | | G | | PGKGLEW | | | | SRLSISK | | SSGPFVY | | TVSA | |
| | SQSLSIT | | | | LGV | | | | DNSKSQV | | | | | |
| | CTVS | | | | | | | | FLKMNSL | | | | | |
| | | | | | | | | | QTDDTAM | | | | | |
| | | | | | | | | | YYC | | | | | |
| H5S19- | QVQLKES | 220 | GFSLTSY | 306 | VHWVRQP | 392 | IWAGGIT | 479 | NYNSALM | 598 | ARDWERD | 732 | WGQGTLV | 852 |
| 20BH | GPGLVAP | | G | | AGKGLEW | | | | SRLSIIQ | | SSGPFVY | | TVSA | |
| | SQSLSIT | | | | LGV | | | | DNSKSQV | | | | | |
| | CTVS | | | | | | | | FLKMNSL | | | | | |
| | | | | | | | | | QTDDTAM | | | | | |
| | | | | | | | | | YYC | | | | | |
| H5S19- | QVQLKES | 221 | GFSLTSY | 306 | VHWVRQP | 391 | IWAGGIT | 479 | NYNSALM | 597 | ARDWERD | 732 | WGQGTLV | 852 |
| 20CH | GPVLVAP | | G | | PGKGLEW | | | | SRLSISK | | SSGPFVY | | TVSA | |
| | SQSLSIT | | | | LGV | | | | DNSKSQV | | | | | |
| | CTVS | | | | | | | | FLKMNSL | | | | | |
| | | | | | | | | | QTDDTAM | | | | | |
| | | | | | | | | | YYC | | | | | |
| H5S19- | QVQLKES | 220 | GFSLTSY | 306 | VHWVRQP | 391 | IWAGGIT | 479 | NYNSALM | 599 | ARDWERD | 730 | WGQGTLV | 852 |
| 21AH | GPGLVAP | | G | | PGKGLEW | | | | SRLSIST | | SSGPFPY | | TVSA | |
| | SQSLSIT | | | | LGV | | | | DNSRSQV | | | | | |
| | CTVS | | | | | | | | FLKMNSL | | | | | |
| | | | | | | | | | QTDDTAM | | | | | |
| | | | | | | | | | YYC | | | | | |
| H5S19- | QVQLKES | 220 | GFSLTNY | 308 | VHWLRQP | 393 | IWAGGIT | 479 | NYNSALM | 593 | ARDWERD | 731 | WGQGTLV | 852 |
| 22AH | GPGLVAP | | G | | PGKGLEW | | | | SRLSISN | | SSGPFAY | | TVSA | |
| | SQSLSIT | | | | LGV | | | | DNSRSQV | | | | | |
| | CTVS | | | | | | | | FLKMNSL | | | | | |
| | | | | | | | | | QTDDTAM | | | | | |
| | | | | | | | | | YYC | | | | | |
| H5S19- | QVQLKES | 220 | GFSLTTY | 305 | VYWVRQP | 394 | IWAGGIT | 479 | NYNSALM | 595 | ARDWERD | 731 | WGQGTLV | 852 |
| 26AH | GPGLVAP | | G | | PGKGLEW | | | | SRLSISK | | SSGPFAY | | TVSA | |
| | SQSLSIT | | | | LGV | | | | DNSKSQV | | | | | |
| | CTVS | | | | | | | | FLKMNSL | | | | | |
| | | | | | | | | | QTGDTAM | | | | | |
| | | | | | | | | | YYC | | | | | |
| H5S19- | QVQLKES | 220 | GFSLTSY | 306 | VHWVRQP | 391 | IWAGGIT | 479 | SYNSALM | 600 | ARDWERD | 730 | WGQGTLV | 852 |
| 27AH | GPGLVAP | | G | | PGKGLEW | | | | SRLSISS | | SSGPFPY | | TVSA | |
| | SQSLSIT | | | | LGV | | | | DNSRSQV | | | | | |
| | CTVS | | | | | | | | FLKMNSL | | | | | |
| | | | | | | | | | QTDDTAM | | | | | |
| | | | | | | | | | YYC | | | | | |
| ITI_ | QVQLKES | 222 | GFSLTTY | 305 | VHWVRQP | 391 | IWAGGIT | 479 | NYNSALM | 601 | ARDWERD | 730 | WGQGTLV | 852 |
| 14 | GPGLVAP | | G | | PGKGLEW | | | | SRLSISK | | SSGPFPY | | TVSA | |
| 4H | SQNLSIT | | | | LGV | | | | DNFKSQV | | | | | |
| | CTVS | | | | | | | | FLKMNSL | | | | | |
| | | | | | | | | | QTDDTAI | | | | | |
| | | | | | | | | | YYC | | | | | |
| ITI_ | QVQLKES | 222 | GFSLSTY | 309 | VHWVRQP | 391 | IWAGGIT | 479 | NYNSALM | 601 | ARDWERD | 730 | WGQGTLV | 852 |
| 14 | GPGLVAP | | G | | PGKGLEW | | | | SRLSISK | | SSGPFPY | | TVSA | |
| 5H | SQNLSIT | | | | LGV | | | | DNFKSQV | | | | | |
| | CTVS | | | | | | | | FLKMNSL | | | | | |
| | | | | | | | | | QTDDTAI | | | | | |
| | | | | | | | | | YYC | | | | | |
| ITI_ | QVQLKES | 220 | GFSLTTY | 305 | VHWVRQP | 391 | IWAGGIT | 479 | NYNSALM | 602 | ARDWERD | 731 | WGQGTLV | 852 |
| 14 | GPGLVAP | | G | | PGKGLEW | | | | SRLNISK | | SSGPFAY | | TVSA | |
| 6H | SQSLSIT | | | | LGV | | | | DNSKSQV | | | | | |
| | CTVS | | | | | | | | FLKMNSL | | | | | |
| | | | | | | | | | QSDDTAM | | | | | |
| | | | | | | | | | YYC | | | | | |
| ITI_ | QVQLKES | 220 | GFSLTSY | 306 | VHWVRQP | 391 | IWAGGIT | 479 | NYNSALM | 603 | ARDWERD | 730 | WGQGTLV | 852 |
| 16 | GPGLVAP | | G | | PGKGLEW | | | | SRLSINI | | SSGPFPY | | TVSA | |
| 2H | SQSLSIT | | | | LGV | | | | DNSKSQV | | | | | |
| | CTVS | | | | | | | | FLKMNSL | | | | | |
| | | | | | | | | | QTDDTAM | | | | | |
| | | | | | | | | | YYC | | | | | |
| ITI_ | GAAEGVR | 223 | GFSLTTY | 305 | VHWVRQP | 391 | IWAGGIT | 479 | NYNSALM | 604 | ARDWERD | 731 | WGQGTLV | 852 |
| 16 | RPGLVAP | | G | | PGKGLEW | | | | SRLNINK | | SSGPFAY | | TVSA | |
| 4H | SQSLSIT | | | | LGV | | | | DNSKSQV | | | | | |
| | CTVS | | | | | | | | FLKMNSL | | | | | |
| | | | | | | | | | QTGDTAM | | | | | |
| | | | | | | | | | YYC | | | | | |
| ITI_ | QVQLKES | 220 | GFSLTSY | 306 | VHWVRQP | 391 | IWAGGIT | 479 | NYNSALM | 605 | ARDWERD | 731 | WGQGTLV | 852 |
| 16 | GPGLVAP | | G | | PGKGLEW | | | | SRLSITK | | SSGPFAY | | TVSA | |
| 5H | SQSLSIT | | | | LGV | | | | DNSKSQV | | | | | |
| | CTVS | | | | | | | | FLKMNSL | | | | | |
| | | | | | | | | | QTDDTAM | | | | | |
| | | | | | | | | | YYC | | | | | |
| ITI_ | QVQLKES | 220 | GFSLTTY | 305 | VHWVRQP | 391 | IWAGGIT | 479 | NYNSALM | 604 | ARDWERD | 731 | WGQGTLV | 852 |
| 16 | GPGLVAP | | G | | PGKGLEW | | | | SRLNINK | | SSGPFAY | | TVSA | |
| 8H | SQSLSIT | | | | LGV | | | | DNSKSQV | | | | | |
| | CTVS | | | | | | | | FLKMNSL | | | | | |
| | | | | | | | | | QTGDTAM | | | | | |
| | | | | | | | | | YYC | | | | | |
| | | Seq. | | Seq. | | Seq. | | Seq. | | Seq. | | Seq. | | Seq. |
| | FR1 | ID | CDR1 | ID | FR2 | ID | CDR2 | ID | FR3 | ID | CDR3 | ID | FR4 ID | ID |

Consensus Cluster #23

| | | | | | | | | | [K/E/G/ | | | | | |
|---|---|---|---|---|---|---|---|---|---|---|---|---|---|---|
| | | | | | | | | | Y/N/D/H | | | | | |
| | | | | | | | | | /S][Y/F | | | | | |
| | | | | | | | | | ][D/N/S | | | | | |
| | | | | | | | | | /P][P/E | | | | | |
| | | | | | | | | | /V/D/A/ | | | | | |
| | | | | | | | | | Q][K/S/ | | | | | |
| | | | | | | | | | T/A][F/ | | | | | |
| | | | | | | | | | V/L][Q/ | | | | | |
| | | | | | | | | | K/T/I][ | | | | | |
| | | | | | | | | | G/S/C/D | | | | | |
| | | | | | | | | | ][K/R][ | | | | | |
| | | | | | | | | | A/F/I/L | | | | | |
| | | | | | | | | | ][T/S/K | | | | | |
| | | | | | | | | | ][I/L/F | | | | | |
| | | | | | | | | | ][M/T/S | | | | | |
| | | | | | | | | | ][A/S/R | | | | | |
| | | | | | | | | | /K/V][D | | | | | |
| | [E/D/Q] | | | | | | | | /E][T/K | | | | | |
| | V[Q/K]L | | | | | | | | /N/S][S | | | | | |
| | [Q/V/K] | | | | [I/M/W/ | | | | /A][S/Q | | | | | |
| | [Q/E][S | | | | V][H/S/ | | | | /K][N/S | | A[Q/S/R | | | |
| | /P]G[A/ | | | | N/G/E]W | | | | ][T/I/Q | | /I/T/G] | | | |
| | P/G][E/ | | | | [V/I/M] | | [I/F][D | | ][A/L/F | | [G/S/R/ | | | |
| | G]L[V/M | | | | [K/R]Q[ | | /N/R/S/ | | /V][Y/F | | M/V/W/N | | | |
| | ][K/Q/N | | | | R/K/T/F | | Y/L/W/H | | ][L/M/F | | /Y/E/C] | | | |
| | /R]P[G/ | | | | /S/N][P | | ][P/N/Y | | /I][Q/E | | [G/-/P/ | | | |
| | S][A/G/ | | G[F/Y][ | | /H][E/G | | /S][A/Y | | /K][L/M | | L/Y][G/ | | | |
| | Q/T][S/ | | N/T/S][ | | ][Q/K/N | | /Q/S/G] | | ][S/N][ | | /L/S/N/ | | | |
| | P][V/L] | | I/F/L][ | | /M/H/R] | | [-/A][- | | S/T/R][ | | R/Y][-/ | | | |
| | [K/R/S] | | -/T][K/ | | [G/A/K/ | | /N][N/A | | L/V][T/ | | W/G][G/ | | | |
| | [L/M/I] | | T/S/N][ | | R/S]LEW | | /-/G/S/ | | R/Q][S/ | | s/-/N][ | | | |
| | [S/T]C[ | | D/S/I/N | | [I/L/M/ | | D][G/D/ | | V/A/T][ | | A/S/-/R | | | |
| | T/K/A][ | | /T][T/Y | | V][G/A] | | Y/S][N/ | | E/D]D[T | | /L/K/W/ | | | |
| | A/T/V][ | | ][Y/V/A | | [R/Y/F/ | | G/T/H/Y | | /S]A[V/ | | H][M/F/ | | WGQGT[S | |
| | S/T/A/F | | /T/W/G/ | | E/D/V/N | | /S/E/D] | | T/I/M]Y | | Y/P/I/L | | /T][V/L | |
| | ] | 224 | P] | 310 | ] | 395 | [I/T] | 481 | YC | 606 | /V/W]DY | 733 | ]TVSS | 857 |
| H5S14- | QVQLKQS | 225 | GFSL-TS | 311 | VHWVRQS | 396 | IWSG--- | 482 | DYNAAFI | 607 | ARNLGGS | 734 | WGQGTSV | 848 |
| 15AH | GPGLVQP | | YG | | PGKGLEW | | GST | | CRLSISK | | WVDY | | TVSS | |
| | SQSLSIT | | | | LGV | | | | DSSKSQV | | | | | |
| | CTVS | | | | | | | | FFKMNSL | | | | | |
| | | | | | | | | | QADDTAM | | | | | |
| | | | | | | | | | YYC | | | | | |
| H5S14- | QVQLQQS | 226 | GYTF-TN | 312 | IGWVKQR | 397 | IYPG--G | 483 | NYNEKFK | 608 | ARNGN-- | 735 | WGQGTTL | 856 |
| 17AH | GAELVRP | | YW | | PGHGLEW | | GYT | | GKATLTA | | SLDY | | TVSS | |
| | GTSVKMS | | | | IGD | | | | DTSSSTA | | | | | |
| | CKAA | | | | | | | | YMQLSSL | | | | | |
| | | | | | | | | | TSEDSAI | | | | | |
| | | | | | | | | | YYC | | | | | |
| H5S14- | QVQLQQS | 227 | GYTF-TT | 313 | IEWMKQN | 398 | FHPY--N | 484 | KYNEKFK | 609 | ARRLYGG | 736 | WGQGTSV | 848 |
| 25AH | GAELVKP | | YP | | HGKSLEW | | DDT | | GKAKLTV | | AMDY | | TVSS | |
| | GASVKMS | | | | IGN | | | | EKSSSTV | | | | | |
| | CKAF | | | | | | | | YLELSRL | | | | | |
| | | | | | | | | | TSDDSAV | | | | | |
| | | | | | | | | | YYC | | | | | |
| H5S14- | EVKLVES | 228 | GFTF-TD | 314 | MSWVRQT | 399 | IRNQANA | 485 | EYSVSVK | 610 | ARV---- | 737 | WGQGTTL | 856 |
| 6AH | GGGLVQP | | YY | | PGKALEW | | YTT | | GRFTISR | | -PDY | | TVSS | |
| | GGSLRLS | | | | LGF | | | | DNSQSIL | | | | | |
| | CATS | | | | | | | | YLQMNTL | | | | | |
| | | | | | | | | | RVEDSAT | | | | | |
| | | | | | | | | | YYC | | | | | |
| H5S15- | EVQLQQS | 229 | GFNI-KD | 315 | MHWVKQR | 400 | IDPA--N | 486 | KFDPKFQ | 611 | ASRGG-S | 738 | WGQGTTL | 856 |
| 12AH | GAELVKP | | TY | | PEQGLEW | | GNT | | GKATITA | | SFDY | | TVSS | |
| | GASVKLS | | | | IGR | | | | DTSSNTA | | | | | |
| | CTAS | | | | | | | | YLQLSSL | | | | | |
| | | | | | | | | | TSEDTAV | | | | | |
| | | | | | | | | | YYC | | | | | |
| H5S15- | QVQLQQP | 230 | GYTF-TS | 316 | MNWVKQR | 401 | IDPS--D | 487 | HYNQKFK | 612 | AREYYGN | 739 | WGQGTTL | 856 |
| 30AH | GAELVKP | | YW | | PGRGLEW | | SET | | DKATLTV | | HFDY | | TVSS | |
| | GAPVKLS | | | | IGR | | | | DKSSSTA | | | | | |
| | CKAS | | | | | | | | YIQLSSL | | | | | |
| | | | | | | | | | TSEDSAV | | | | | |
| | | | | | | | | | YYC | | | | | |
| H5S15- | EVQLQQS | 231 | GYTF-TS | 317 | MHWVKQK | 402 | INPY--N | 488 | KYNEKFK | 613 | ARM---- | 740 | WGQGTTL | 856 |
| 38AH | GPELVKP | | YV | | PGQGLEW | | DGT | | GKATLTS | | -YDY | | TVSS | |
| | GASVKMS | | | | IGY | | | | DKSSSTA | | | | | |
| | CKAS | | | | | | | | YMELSSL | | | | | |
| | | | | | | | | | TSEDSAV | | | | | |
| | | | | | | | | | YYC | | | | | |
| H5S19- | DVQLQES | 232 | GYSITSD | 318 | WNWIRQF | 403 | ISYS--- | 489 | GYNPSLK | 614 | ARWGL-- | 741 | WGQGTTL | 856 |
| 11AH | GPGLVNP | | YA | | PGNKLEW | | GNT | | SRISITR | | RIDY | | TVSS | |
| | SQSLSLT | | | | MGY | | | | DTSKNQF | | | | | |
| | CTVT | | | | | | | | FLQLNSV | | | | | |
| | | | | | | | | | TSEDTAT | | | | | |
| | | | | | | | | | YYC | | | | | |
| H5S19- | QVQLQQS | 233 | GYTF-SS | 319 | IEWVKQR | 404 | ILPG--S | 490 | NYNEKFK | 615 | ARYPRWG | 742 | WGQGTTL | 856 |
| 25AH | GAELMKP | | YW | | PGHGLEW | | GST | | GKATFTA | | KIDY | | TVSS | |
| | GASVKIS | | | | IGE | | | | DTSSNTA | | | | | |
| | CKAT | | | | | | | | YMQLSSL | | | | | |
| | | | | | | | | | TSEDSAV | | | | | |
| | | | | | | | | | YYC | | | | | |
| H5S19- | EVQLVES | 234 | GFTF-NI | 320 | MSWVRQS | 405 | ISSG--G | 491 | YYPDTVT | 616 | ARGGS-- | 743 | WGQGTTL | 856 |
| 6AH | GGGLVKP | | YT | | PEMRLEW | | SHT | | GRFTISR | | LFDY | | TVSS | |
| | GGSLKLS | | | | VAE | | | | DNAKNTL | | | | | |
| | CAAS | | | | | | | | YLEMSSL | | | | | |
| | | | | | | | | | RSEDTAI | | | | | |
| | | | | | | | | | YYC | | | | | |
| H5S20- | EVQLQQS | 229 | GFNI-KD | 315 | MHWVKQR | 400 | IDPA--N | 486 | KYDPKFQ | 617 | ATSGG-S | 744 | WGQGTTL | 856 |
| 15AH | GAELVKP | | TY | | PEQGLEW | | GNT | | GKATITA | | SYDY | | TVSS | |
| | GASVKLS | | | | IGR | | | | DTSSNTA | | | | | |
| | CTAS | | | | | | | | YLQLSSL | | | | | |
| | | | | | | | | | TSEDTAV | | | | | |
| | | | | | | | | | YYC | | | | | |
| H5S20- | EVQLQQS | 229 | GFNI-KD | 315 | MHWVKQR | 400 | IDPA--N | 486 | KYDPKFQ | 617 | ARSGG-S | 745 | WGQGTTL | 856 |
| 25AH | GAELVKP | | TY | | PEQGLEW | | GNT | | GKATITA | | SYDY | | TVSS | |
| | GASVKLS | | | | IGR | | | | DTSSNTA | | | | | |
| | CTAS | | | | | | | | YLQLSSL | | | | | |
| | | | | | | | | | TSEDTAV | | | | | |
| | | | | | | | | | YYC | | | | | |
| H5S20- | EVQLQQS | 229 | GFNI-KD | 315 | MHWVKQR | 400 | IDPA--N | 486 | KYDPKFQ | 617 | ASSGG-S | 746 | WGQGTTL | 856 |
| 34AH | GAELVKP | | TY | | PEQGLEW | | GNT | | GKATITA | | SFDY | | TVSS | |
| | GASVKLS | | | | IGR | | | | DTSSNTA | | | | | |
| | CTAS | | | | | | | | YLQLSSL | | | | | |
| | | | | | | | | | TSEDTAV | | | | | |
| | | | | | | | | | YYC | | | | | |
| H5S20- | EVQLQQS | 229 | GFNI-KD | 315 | MHWVKQR | 400 | IDPA--N | 486 | KYDPKFQ | 617 | AGSGG-S | 747 | WGQGTTL | 856 |
| 42AH | GAELVKP | | TY | | PEQGLEW | | GNT | | GKATITA | | SYDY | | TVSS | |
| | GASVKLS | | | | IGR | | | | DTSSNTA | | | | | |
| | CTAS | | | | | | | | YLQLSSL | | | | | |
| | | | | | | | | | TSEDTAV | | | | | |
| | | | | | | | | | YYC | | | | | |
| H5S20- | EVQLQQS | 229 | GFNI-KD | 315 | MHWVKQR | 400 | IDPA--N | 486 | KYDPKFQ | 617 | AISGG-S | 748 | WGQGTTL | 856 |
| 8AH | GAELVKP | | TY | | PEQGLEW | | GNT | | GKATITA | | SYDY | | TVSS | |
| | GASVKLS | | | | IGR | | | | DTSSNTA | | | | | |
| | CTAS | | | | | | | | YLQLSSL | | | | | |
| | | | | | | | | | TSEDTAV | | | | | |
| | | | | | | | | | YYC | | | | | |
| ITI_ | DVQLQES | 235 | GYSITSD | 318 | WNWVRQF | 406 | ISYS--- | 492 | SYNPSLK | 618 | ARCYYGG | 749 | WGQGTTL | 856 |
| 02 | GPGLVKP | | YA | | PGNKLEW | | GST | | SRISITR | | RWDY | | TVSS | |
| 1H | SQSLSLT | | | | VGY | | | | DTSKNQF | | | | | |
| | CTVT | | | | | | | | FLQLNSV | | | | | |
| | | | | | | | | | TTEDTAT | | | | | |
| | | | | | | | | | YYC | | | | | |
| ITI_ | DVQLQES | 232 | GYSITSD | 318 | WNWIRQF | 403 | INYS--- | 493 | GYNPSLK | 614 | ARWGL-- | 741 | WGQGTTL | 856 |
| 17 | GPGLVNP | | YA | | PGNKLEW | | GNT | | SRISITR | | RIDY | | TVSS | |
| 3H | SQSLSLT | | | | MGY | | | | DTSKNQF | | | | | |
| | CTVT | | | | | | | | FLQLNSV | | | | | |
| | | | | | | | | | TSEDTAT | | | | | |
| | | | | | | | | | YYC | | | | | |
| ITI_ | EVQLQQS | 229 | GFNI-KD | 315 | IHWVKQR | 407 | IDPA--N | 494 | KYDPKFQ | 619 | AQGGG-G | 750 | WGQGTSV | 848 |
| 20 | GAELVKP | | TY | | PEQGLEW | | GNI | | GKATIMA | | AMDY | | TVSS | |
| 0H | GASVKLS | | | | IGR | | | | DTSSNTA | | | | | |
| | CTAS | | | | | | | | YLQLSSL | | | | | |
| | | | | | | | | | TSEDTAV | | | | | |
| | | | | | | | | | YYC | | | | | |
| | | Seq. | | Seq. | | Seq. | | Seq. | | Seq. | | Seq. | | Seq. |
| | FR1 | ID | CDR1 | ID | FR2 | ID | CDR2 | ID | FR3 | ID | CDR3 | ID | FR4 ID | ID |

Consensus Cluster #21

| | | | | | | | | | [H/N/K] | | | | | |
|---|---|---|---|---|---|---|---|---|---|---|---|---|---|---|
| | | | | | | | | | [Y/F][N | | | | | |
| | | | | | | | | | /D/A][Q | | | | | |
| | | | | | | | | | /E/P]KF | | | | | |
| | | | | | | | | | [K/R/Q] | | | | | |
| | | | | | | | | | [D/G/V] | | [A/V][I | | | |
| | | | | | | | | | [K/R]AT | | /R/P/A/ | | | |
| | | | | | | | | | [L/I]T[ | | G/T/N][ | | | |
| | | | | | | | | | V/A/T]D | | Y/R/P][ | | | |
| | | | | | | | | | [K/T/S] | | Y/G/F][ | | | |
| | [Q/E]VQ | | | | | | | | SS[S/N] | | S/H/G/N | | | |
| | LQQ[P/S | | | | [M/I/V] | | | | T[A/V]Y | | /A][N/Y | | | |
| | ]GA[E/D | | | | [N/E/H] | | | | [I/M/L] | | /S/R][- | | | |
| | ]L[V/L] | | G[Y/F][ | | W[V/L][ | | I[D/N/A | | [Q/H]LS | | /Y/T/S] | | | |
| | [K/R]PG | | T/A/N/Y | | K/N][Q/ | | ]P[S/G/ | | [S/R]LT | | [-/G/P/ | | | |
| | [A/T][P | | ][F/I][ | | E]RP[G/ | | A][D/S/ | | S[E/D]D | | Y/N][P/ | | | |
| | /S]V[K/ | | S/T/K/R | | E][R/Q] | | N][S/G/ | | [S/T/N/ | | Y/A/D][ | | WGQGT[T | |
| | R/M][L/ | | ][T/N/D | | GL[E/A] | | D][E/G/ | | A]AV[Y/ | | V/W/G]F | | /L][L/V | |
| | V]SC[K/ | | ][Y/T][ | | WIG[R/V | | N/K/Y/R | | F][Y/F] | | [D/A/V] | | ]TVS[S/ | |
| | T]AS | 236 | W/L/Y] | 321 | ] | 408 | ]T | 495 | C | 620 | [Y/F] | 751 | A] | 858 |
| H5S15- | EVQLQQS | 237 | GFNIKDT | 322 | MHWVKQR | 400 | IAPANGR | 496 | KYDPKFQ | 617 | ANYYASS | 752 | WGQGTLV | 852 |
| 11AH | GADLVKP | | Y | | PEQGLEW | | T | | GKATITA | | YDWFAY | | TVSA | |
| | GASVKLS | | | | IGR | | | | DTSSNTA | | | | | |
| | CTAS | | | | | | | | YLQLSSL | | | | | |
| | | | | | | | | | TSEDTAV | | | | | |
| | | | | | | | | | YYC | | | | | |
| H5S15- | EVQLQQS | 229 | GFNIKDT | 322 | MHWVKQR | 400 | IAPANGK | 497 | KFDPKFQ | 611 | ANYYGRS | 753 | WGQGTLV | 852 |
| 17AH | GAELVKP | | Y | | PEQGLEW | | T | | GKATITA | | NDWFVY | | TVSA | |
| | GASVKLS | | | | IGR | | | | DTSSNTA | | | | | |
| | CTAS | | | | | | | | YLQLSSL | | | | | |
| | | | | | | | | | TSEDTAV | | | | | |
| | | | | | | | | | YYC | | | | | |
| H5S15- | EVQLQQS | 229 | GFNIKDT | 322 | MHWVKQR | 409 | IAPANGY | 498 | KYDPKFQ | 621 | ANYFGNT | 754 | WGQGTLV | 852 |
| 1AH | GAELVKP | | Y | | PEQGLAW | | T | | GKATITT | | YDWFAF | | TVSA | |
| | GASVKLS | | | | IGR | | | | DTSSNTA | | | | | |
| | CTAS | | | | | | | | YLHLSRL | | | | | |
| | | | | | | | | | TSEDTAV | | | | | |
| | | | | | | | | | YYC | | | | | |
| H5S15- | EVQLQQS | 229 | GFNIKDT | 322 | MHWVKQR | 400 | IAPANGR | 496 | KYDPKFQ | 617 | ANYYASS | 755 | WGQGTLV | 852 |
| 24AH | GAELVKP | | Y | | PEQGLEW | | T | | GKATITA | | YDWFVY | | TVSA | |
| | GASVKLS | | | | IGR | | | | DTSSNTA | | | | | |
| | CTAS | | | | | | | | YLQLSSL | | | | | |
| | | | | | | | | | TSEDTAV | | | | | |
| | | | | | | | | | YYC | | | | | |
| H5S15- | EVQLQQS | 229 | GFNIKDT | 322 | MHWVKQR | 400 | IDPANGN | 499 | KYDPKFQ | 617 | ARPYGN- | 756 | WGQGTLV | 852 |
| 36AH | GAELVKP | | Y | | PEQGLEW | | T | | GKATITA | | -YGFAY | | TVSA | |
| | GASVKLS | | | | IGR | | | | DTSSNTA | | | | | |
| | CTAS | | | | | | | | YLQLSSL | | | | | |
| | | | | | | | | | TSEDTAV | | | | | |
| | | | | | | | | | YYC | | | | | |
| H5S15- | QVQLQQP | 230 | GYTFSTY | 323 | MNWVKQR | 401 | IDPSDSE | 500 | HYNQKFK | 612 | AIYYSN- | 757 | WGQGTTL | 856 |
| 37AH | GAELVKP | | W | | PGRGLEW | | T | | DKATLTV | | -PVFDY | | TVSS | |
| | GAPVKLS | | | | IGR | | | | DKSSSTA | | | | | |
| | CKAS | | | | | | | | YIQLSSL | | | | | |
| | | | | | | | | | TSEDSAV | | | | | |
| | | | | | | | | | YYC | | | | | |
| H5S15- | EVQLQQS | 229 | GFNIKDT | 322 | MHWVKQR | 409 | IAPANGY | 498 | KYDPKFQ | 622 | VTYFGNT | 758 | WGQGTLV | 852 |
| 3AH | GAELVKP | | Y | | PEQGLAW | | T | | GKATITT | | YDWFAY | | TVSA | |
| | GASVKLS | | | | IGR | | | | DTSSNTA | | | | | |
| | CTAS | | | | | | | | YLQLSSL | | | | | |
| | | | | | | | | | TSEDTAV | | | | | |
| | | | | | | | | | YYC | | | | | |
| H5S20- | EVQLQQS | 229 | GFNIKDT | 322 | MHWVNQR | 410 | IDPANGN | 499 | KYAPKFQ | 623 | AGYGNS- | 759 | WGQGTLV | 852 |
| 10AH | GAELVKP | | Y | | PEQGLEW | | T | | GKATITA | | -PWFAY | | TVSA | |
| | GASVKLS | | | | IGR | | | | DTSSNTV | | | | | |
| | CTAS | | | | | | | | YLQLSSL | | | | | |
| | | | | | | | | | TSEDTAV | | | | | |
| | | | | | | | | | YYC | | | | | |
| H5S20- | EVQLQQS | 229 | GFNIKDT | 322 | MHWVNQR | 410 | IDPANGN | 499 | KYAPKFQ | 624 | AGYGNS- | 759 | WGQGTLV | 852 |
| 10BH | GAELVKP | | Y | | PEQGLEW | | T | | GKATITA | | -PWFAY | | TVSA | |
| | GASVKLS | | | | IGR | | | | DTSSNTA | | | | | |
| | CTAS | | | | | | | | YLQLSSL | | | | | |
| | | | | | | | | | TSEDTAV | | | | | |
| | | | | | | | | | YYC | | | | | |
| H5S20- | EVQLQQS | 229 | GFNIKDT | 322 | MHWVNQR | 410 | IDPANGK | 501 | KYAPKFQ | 625 | AGYGNS- | 759 | WGQGTLV | 852 |
| 17AH | GAELVKP | | Y | | PEQGLEW | | T | | DKATITA | | -PWFAY | | TVSA | |
| | GASVKLS | | | | IGR | | | | DTSSNTA | | | | | |
| | CTAS | | | | | | | | YLQLSSL | | | | | |
| | | | | | | | | | TSEDTAV | | | | | |
| | | | | | | | | | YYC | | | | | |
| H5S20- | EVQLQQS | 229 | GFNIKDT | 322 | VHWVKER | 411 | IDPANDN | 502 | KYAPKFQ | 626 | APYGNY- | 760 | WGQGTLV | 852 |
| 49AH | GAELVKP | | Y | | PEQGLEW | | T | | VKATITA | | PAWFAY | | TVSA | |
| | GASVKLS | | | | IGR | | | | DTSSNTA | | | | | |
| | CTAS | | | | | | | | YLQLSSL | | | | | |
| | | | | | | | | | TSEDNAV | | | | | |
| | | | | | | | | | YYC | | | | | |
| H5S20- | EVQLQQS | 229 | GFNIKDT | 322 | IHWLNQR | 412 | IDPANGK | 501 | KFAPKFQ | 627 | AGYGNS- | 759 | WGQGTLV | 852 |
| 52AH | GAELVKP | | Y | | PEQGLEW | | T | | DKATITA | | -PWFAY | | TVSA | |
| | GASVKLS | | | | IGR | | | | DTSSNTA | | | | | |
| | CTAS | | | | | | | | YLQLSSL | | | | | |
| | | | | | | | | | TSEDTAV | | | | | |
| | | | | | | | | | YYC | | | | | |
| H5S20- | EVQLQQS | 238 | GFYIKDT | 324 | MHWVNQR | 410 | IDPANGK | 501 | KYAPKFQ | 628 | AGYGNS- | 759 | WGQGTLV | 852 |
| 58AH | GAELVKP | | Y | | PEQGLEW | | T | | DKATITA | | -PWFAY | | TVSA | |
| | GASVMLS | | | | IGR | | | | DSSSNTA | | | | | |
| | CTAS | | | | | | | | YLQLSSL | | | | | |
| | | | | | | | | | TSEDTAV | | | | | |
| | | | | | | | | | YYQ | | | | | |
| H5S20- | EVQLQQS | 237 | GFNIRDT | 325 | MHWVNQR | 410 | IDPANGN | 499 | KYAPKFQ | 629 | AGYGNS- | 759 | WGQGTLV | 852 |
| 9AH | GADLVKP | | Y | | PEQGLEW | | T | | GRATITA | | -PWFAY | | TVSA | |
| | GASVKLS | | | | IGR | | | | DTSSNTA | | | | | |
| | CTAS | | | | | | | | YLHLSSL | | | | | |
| | | | | | | | | | TSEDTAV | | | | | |
| | | | | | | | | | YYC | | | | | |
| ITI_ | EVQLQQS | 239 | GFNFKDT | 326 | MHWVNQR | 410 | IDPANGK | 501 | KYAPKFQ | 630 | AAYGNS- | 761 | WGQGTLV | 852 |
| 09 | GAELLKP | | Y | | PEQGLEW | | T | | GKATITA | | -PWFAY | | TVSA | |
| 1H | GASVRLS | | | | IGR | | | | DTSSNTA | | | | | |
| | CTAS | | | | | | | | YLQLSSL | | | | | |
| | | | | | | | | | TSEDAAV | | | | | |
| | | | | | | | | | FYC | | | | | |
| ITI_ | QVQLQQS | 240 | GYAFTNY | 327 | IEWVKQR | 413 | INPGSGG | 503 | NYNEKFR | 631 | ARRGHNY | 762 | WGQGTLV | 852 |
| 12 | GAELVRP | | L | | PGQGLEW | | T | | GKATLTA | | GPWFAY | | TVSA | |
| 2H | GTSVKVS | | | | IGV | | | | DKSSSTA | | | | | |
| | CKAS | | | | | | | | YMQLSSL | | | | | |
| | | | | | | | | | TSDDSAV | | | | | |
| | | | | | | | | | YFC | | | | | |
| | | Seq. | | Seq. | | Seq. | | Seq. | | Seq. | | Seq. | | Seq. |
| | FR1 | ID | CDR1 | ID | FR2 | ID | CDR2 | ID | FR3 | ID | CDR3 | ID | FR4 ID | ID |

Consensus Cluster #10

| | | | | | | | | | [K/N/Y/ | | | | | |
|---|---|---|---|---|---|---|---|---|---|---|---|---|---|---|
| | | | | | | | | | R/D]Y[N | | | | | |
| | | | | | | | | | /P][E/Q | | | | | |
| | | | | | | | | | /D/P/A] | | | | | |
| | | | | | | | | | [K/S/T/ | | | | | |
| | | | | | | | | | A/P][F/ | | | | | |
| | | | | | | | | | V/L][K/ | | | | | |
| | | | | | | | | | R/I][G/ | | | | | |
| | | | | | | | | | D/S][K/ | | | | | |
| | | | | | | | | | R][A/F/ | | | | | |
| | | | | | | | | | L][T/S] | | | | | |
| | | | | | | | | | [L/I][T | | | | | |
| | | | | | | | | | /S][S/V | | | | | |
| | | | | | | | | | /A/R/K] | | | | | |
| | | | | | | | | | D[K/T/N | | | | | |
| | | | | | | | | | ][S/A][ | | [A/S/T] | | | |
| | [E/Q]V[ | | | | | | | | S/K/R][ | | R[G/R/L | | | |
| | Q/T]L[Q | | | | | | | | S/N][T/ | | /D/S]I/ | | | |
| | /V/K][Q | | | | | | | | N/Q][A/ | | E/H/V/L | | | |
| | /E][S/P | | | | | | | | L/V][Y/ | | /G/M/Y] | | | |
| | ]G[P/A/ | | | | [M/I/L/ | | | | F][M/L/ | | [I/R/Y/ | | | |
| | G][E/G] | | | | V][H/N/ | | | | F][E/R/ | | D/N/G][ | | | |
| | [L/I][V | | | | S/Y/E]W | | | | Q/K][L/ | | T/R/G/- | | | |
| | /L][K/R | | | | [V/I][K | | | | M/I][S/ | | /Y/S/N] | | | |
| | /Q]P[G/ | | | | /R]Q[K/ | | I[N/D/Y | | T/N][S/ | | [T/G/N/ | | | |
| | S][A/T/ | | G[Y/F][ | | R/T/P/S | | /S/W][P | | T][L/P/ | | -/S/K][ | | | |
| | G/Q][S/ | | T/A/S][ | | ][P/S][ | | /S/D/W] | | V][T/K/ | | V/-/Y/P | | | |
| | T][V/L] | | F/L][-/ | | G/E][Q/ | | [Y/S/G/ | | D/Q][S/ | | ][V/I/- | | | |
| | [K/M/S] | | S][-/T] | | H/K][G/ | | D][N/D/ | | T/A][E/ | | ][E/-][ | | | |
| | [M/L/I/ | | [T/S][S | | R]LEW[I | | G/-/S][ | | A/N/D/S | | P/-][I/ | | | |
| | V][S/T] | | /N/D/G/ | | /V/L][G | | D/S/G][ | | ]D[S/T] | | -/D/Y][ | | | |
| | C[K/A/S | | T][Y/M] | | /A][Y/V | | G/F/Y/S | | A[V/M/T | | L/I/P/- | | WGQG[T/ | |
| | /T][A/F | | [V/W/D/ | | /N/D/T/ | | /D/N][T | | /I][Y/C | | /N/Y/G] | | S]S[V/F | |
| | /V]S | 241 | Y/G/L] | 328 | H] | 414 | /K] | 504 | ][Y/F]C | 632 | YAMDY | 763 | ]TVSS | 859 |
| H5S14- | QVTLKES | 242 | GFSLSTS | 329 | VSWIRQP | 415 | IYWD-DD | 505 | RYNPSLK | 633 | ARSMYGN | 764 | WGQGTSV | 848 |
| 10AH | GPGILQP | | GMG | | SGKGLEW | | K | | SRLTISK | | -YNYAMD | | TVSS | |
| | SQTLSLT | | | | LAH | | | | DTSRNQV | | Y | | | |
| | CSFS | | | | | | | | FLKITSV | | | | | |
| | | | | | | | | | DTADTAT | | | | | |
| | | | | | | | | | YYC | | | | | |
| H5S14- | EVQLVES | 234 | GFTF--S | 330 | MYWVRQT | 416 | ISDGGSY | 506 | YYPDSVK | 634 | ARDGNY- | 765 | WGQGTSV | 848 |
| 16AH | GGGLVKP | | DYY | | PEKRLEW | | T | | GRFTISR | | ------Y | | TVSS | |
| | GGSLKLS | | | | VAT | | | | DNAKNNL | | AMDY | | | |
| | CAAS | | | | | | | | YLQMSSL | | | | | |
| | | | | | | | | | KSEDTAM | | | | | |
| | | | | | | | | | YYC | | | | | |
| H5S14- | QVQLQQP | 243 | GYTF--T | 331 | INWVKQR | 417 | IYPSDSY | 507 | NYNQKFK | 635 | TRGHYGN | 766 | WGQGTSV | 848 |
| 20AH | GAELVRP | | NYW | | PGQGLEW | | T | | DKATLTV | | YDPYAMD | | TVSS | |
| | GASVKLS | | | | IGN | | | | DKSSSTA | | Y | | | |
| | CKAS | | | | | | | | YMQLSSP | | | | | |
| | | | | | | | | | TSEDSAV | | | | | |
| | | | | | | | | | YYC | | | | | |
| H5S14- | EVQLQQS | 231 | GYTF--T | 332 | MHWVKQK | 402 | INPYNDG | 508 | KYNEKFK | 613 | ARGIITT | 767 | WGQGTSV | 848 |
| 22AH | GPELVKP | | SYV | | PGQGLEW | | T | | GKATLTS | | VIEPILY | | TVSS | |
| | GASVKMS | | | | IGY | | | | DKSSSTA | | AMDY | | | |
| | CKAS | | | | | | | | YMELSSL | | | | | |
| | | | | | | | | | TSEDSAV | | | | | |
| | | | | | | | | | YYC | | | | | |
| H5S14- | QVQLQQS | 240 | GYAF--T | 333 | IEWVKQR | 413 | INPGSGG | 503 | KYNEKFK | 636 | ARDYGSS | 768 | WGQGTSV | 848 |
| 26AH | GAELVRP | | NYL | | PGQGLEW | | T | | GKATLTA | | --YGYAM | | TVSS | |
| | GTSVKVS | | | | IGV | | | | DKSSSTA | | DY | | | |
| | CKAS | | | | | | | | YMQLSSL | | | | | |
| | | | | | | | | | TSDDSAV | | | | | |
| | | | | | | | | | YFC | | | | | |
| H5S14- | QVQLQQS | 203 | GYTF--T | 331 | LSWVKQR | 418 | IYPGGGY | 468 | NYNEKFK | 637 | ARRVD-- | 769 | WGQGTSV | 848 |
| 28AH | GAELVRP | | NYW | | PGHGLEW | | T | | GKATLTA | | ----YAM | | TVSS | |
| | GTSVKIS | | | | IGD | | | | DTSSSTA | | DY | | | |
| | CKAS | | | | | | | | YMQLSSL | | | | | |
| | | | | | | | | | TSEDSAV | | | | | |
| | | | | | | | | | CFC | | | | | |
| H5S14- | EVQLQQS | 231 | GYTF--T | 332 | MHWVKQK | 402 | INPYNDG | 508 | KYNEKFK | 613 | ARGIITT | 770 | WGQGTSV | 848 |
| 29AH | GPELVKP | | SYV | | PGQGLEW | | T | | GKATLTS | | VVEPILY | | TVSS | |
| | GASVKMS | | | | IGY | | | | DKSSSTA | | AMDY | | | |
| | CKAS | | | | | | | | YMELSSL | | | | | |
| | | | | | | | | | TSEDSAV | | | | | |
| | | | | | | | | | YYC | | | | | |
| H5S15- | QVQLKQS | 225 | GFSL--T | 334 | VHWVRQS | 396 | IWSG-GN | 509 | DYNPAFI | 638 | ARRGYNK | 771 | WGQGTSF | 860 |
| 33AH | GPGLVQP | | TYG | | PGKGLEW | | T | | SRLSISK | | -----GY | | TVSS | |
| | SQSLSIT | | | | LGV | | | | DNSKSQV | | AMDY | | | |
| | CTVS | | | | | | | | FFKMNTL | | | | | |
| | | | | | | | | | QASDTAI | | | | | |
| | | | | | | | | | YYC | | | | | |
| H5S15- | EVQLVES | 234 | GFAF--S | 335 | MSWVRQT | 419 | ISSGGGS | 510 | YYPDTVK | 639 | ARLLRY- | 772 | WGQGTSV | 848 |
| 40AH | GGGLVKP | | SYD | | PEKRLEW | | T | | GRFTISR | | ---YAMD | | TVSS | |
| | GGSLKLS | | | | VAY | | | | DNAKNTL | | Y | | | |
| | CAAS | | | | | | | | YLQMSSL | | | | | |
| | | | | | | | | | KSEDTAM | | | | | |
| | | | | | | | | | YYC | | | | | |
| H5S19- | QVQLKQS | 225 | GFSL--T | 334 | VHWVRQS | 396 | IWSG-GS | 511 | DYNAAFI | 640 | ARRGYGS | 773 | WGQGTSV | 848 |
| 9AH | GPGLVQP | | TYG | | PGKGLEW | | T | | SRLSISK | | P---YYY | | TVSS | |
| | SQSLSIT | | | | LGV | | | | DNSKSQV | | AMDY | | | |
| | CTVS | | | | | | | | FFKMNSL | | | | | |
| | | | | | | | | | QANDTAI | | | | | |
| | | | | | | | | | YYC | | | | | |
| H5S20- | QVQLQQP | 244 | GYTF--T | 331 | MHWVRQR | 420 | IDPSDSF | 512 | NYNQSFR | 641 | SRGERRG | 774 | WGQGSSV | 861 |
| 21AH | GAELVKP | | NYW | | PGQGLEW | | T | | GKATLTV | | -----IY | | TVSS | |
| | GASVMMS | | | | IGV | | | | DTSSSTA | | AMDY | | | |
| | CKAS | | | | | | | | YMRLSSL | | | | | |
| | | | | | | | | | TSEDSAV | | | | | |
| | | | | | | | | | YFC | | | | | |
| ITI_ | QVQLKQS | 225 | GFSL--T | 334 | VHWVRQS | 396 | IWSG-GS | 511 | DYNAAFI | 640 | ARRGYGK | 775 | WGQGTSV | 848 |
| 13 | GPGLVQP | | TYG | | PGKGLEW | | T | | SRLSISK | | -----GY | | TVSS | |
| 0H | SQSLSIT | | | | LGV | | | | DNSKSQV | | AMDY | | | |
| | CTVS | | | | | | | | FFKMNSL | | | | | |
| | | | | | | | | | QANDTAI | | | | | |
| | | | | | | | | | YYC | | | | | |
| ITI_ | QVQLKQS | 225 | GFSL--T | 334 | VHWVRQS | 396 | IWSG-GS | 511 | DYNAPFI | 642 | ARRGYNK | 771 | WGQGTSV | 848 |
| 13 | GPGLVQP | | TYG | | PGKGLEW | | T | | SRLSISK | | -----GY | | TVSS | |
| 1H | SQSLSIT | | | | LGV | | | | DNSKSQV | | AMDY | | | |
| | CTVS | | | | | | | | FFKMNSL | | | | | |
| | | | | | | | | | QANDTAI | | | | | |
| | | | | | | | | | YYC | | | | | |
| ITI_ | QVQLKQS | 225 | GFSL--T | 334 | IHWVRQS | 421 | IWSG-GS | 511 | DYNAAFI | 643 | ARRGYGS | 773 | WGQGTSV | 848 |
| 18 | GPGLVQP | | TYG | | PGKGLEW | | T | | SRLSITK | | P---YYY | | TVSS | |
| 0H | SQSLSIT | | | | LGV | | | | DKSKSQV | | AMDY | | | |
| | CTVS | | | | | | | | FFKMNSL | | | | | |
| | | | | | | | | | QANDTAI | | | | | |
| | | | | | | | | | YYC | | | | | |
| | | Seq. | | Seq. | | Seq. | | Seq. | | Seq. | | Seq. | | Seq. |
| | FR1 | ID | CDR1 | ID | FR2 | ID | CDR2 | ID | FR3 | ID | CDR3 | ID | FR4 ID | ID |

Consensus Cluster #8

| | | | | | | | | | TY[D/A] | | | | | |
|---|---|---|---|---|---|---|---|---|---|---|---|---|---|---|
| | | | | | | | | | [D/E]DF | | | | | |
| | | | | | | | | | KGRFAFS | | ARS[F/Y | | | |
| | | | | | | | | | LETSAST | | ][T/Y][ | | | |
| | QIQLVQS | | | | [M/V]NW | | | | AYL[Q/R | | T/A/G/K | | WGQ[G/S | |
| | GPE[L/V | | | | VKQAPGK | | | | ]INNLKN | | ][A/N/S | | ]T[T/L/ | |
| | ]KKPGET | | GYT[F/L | | [G/D]LK | | | | ED[T/M/ | | ][T/N/Y | | I][L/V] | |
| | VKISCKA | | ]TN[Y/F | | W[M/V]G | | INTYTGE | | S]A[T/S | | /E][C/A | | TVS[S/A | |
| | S | 245 | ]G | 336 | W | 422 | P | 513 | ]YFC | 644 | ][Y/F] | 776 | ] | 862 |
| H5S15- | QIQLVQS | 246 | GYTLTNY | 337 | MNWVKQA | 423 | INTYTGE | 513 | TYADDFK | 645 | ARSFYGS | 777 | WGQGTLV | 852 |
| 15AH | GPEVKKP | | G | | PGKGLKW | | P | | GRFAFSL | | EAY | | TVSA | |
| | GETVKIS | | | | VGW | | | | ETSASTA | | | | | |
| | CKAS | | | | | | | | YLQINNL | | | | | |
| | | | | | | | | | KNEDMAT | | | | | |
| | | | | | | | | | YFC | | | | | |
| H5S15- | QIQLVQS | 247 | GYTFTNY | 338 | MNWVKQA | 423 | INTYTGE | 513 | TYAEDFK | 646 | ARSFYGS | 777 | WGQGTLV | 852 |
| 7AH | GPELKKP | | G | | PGKGLKW | | P | | GRFAFSL | | EAY | | TVSA | |
| | GETVKIS | | | | VGW | | | | ETSASTA | | | | | |
| | CKAS | | | | | | | | YLQINNL | | | | | |
| | | | | | | | | | KNEDMAT | | | | | |
| | | | | | | | | | YFC | | | | | |
| H5S15- | QIQLVQS | 247 | GYTFTNY | 338 | MNWVKQA | 423 | INTYTGE | 513 | TYADDFK | 645 | ARSFYGS | 777 | WGQGTLV | 852 |
| 7BH | GPELKKP | | G | | PGKGLKW | | P | | GRFAFSL | | EAY | | TVSA | |
| | GETVKIS | | | | VGW | | | | ETSASTA | | | | | |
| | CKAS | | | | | | | | YLQINNL | | | | | |
| | | | | | | | | | KNEDMAT | | | | | |
| | | | | | | | | | YFC | | | | | |
| H5S19- | QIQLVQS | 247 | GYTFTNF | 339 | VNWVKQA | 424 | INTYTGE | 513 | TYADDFK | 647 | ARSYYAN | 778 | WGQGTTL | 856 |
| 13AH | GPELKKP | | G | | PGKGLKW | | P | | GRFAFSL | | YAY | | TVSS | |
| | GETVKIS | | | | MGW | | | | ETSASTA | | | | | |
| | CKAS | | | | | | | | YLRINNL | | | | | |
| | | | | | | | | | KNEDTAT | | | | | |
| | | | | | | | | | YFC | | | | | |
| H5S19- | QIQLVQS | 247 | GYTFTNF | 339 | VNWVKQA | 424 | INTYTGE | 513 | TYADDFK | 648 | ARSFYKN | 779 | WGQGTIL | 863 |
| 3AH | GPELKKP | | G | | PGKGLKW | | P | | GRFAFSL | | YAF | | TVSS | |
| | GETVKIS | | | | MGW | | | | ETSASTA | | | | | |
| | CKAS | | | | | | | | YLRINNL | | | | | |
| | | | | | | | | | KNEDSAT | | | | | |
| | | | | | | | | | YFC | | | | | |
| H5S19- | QIQLVQS | 247 | GYTFTNF | 339 | VNWVKQA | 424 | INTYTGE | 513 | TYADDFK | 647 | ARSFYKN | 779 | WGQGTIL | 863 |
| 3BH | GPELKKP | | G | | PGKGLKW | | P | | GRFAFSL | | YAF | | TVSS | |
| | GETVKIS | | | | MGW | | | | ETSASTA | | | | | |
| | CKAS | | | | | | | | YLRINNL | | | | | |
| | | | | | | | | | KNEDTAT | | | | | |
| | | | | | | | | | YFC | | | | | |
| H5S19- | QIQLVQS | 247 | GYTFTNF | 339 | VNWVKQA | 425 | INTYTGE | 513 | TYADDFK | 647 | ARSFYKN | 779 | WGQGTIL | 863 |
| 3CH | GPELKKP | | G | | PGKDLKW | | P | | GRFAFSL | | YAF | | TVSS | |
| | GETVKIS | | | | MGW | | | | ETSASTA | | | | | |
| | CKAS | | | | | | | | YLRINNL | | | | | |
| | | | | | | | | | KNEDTAT | | | | | |
| | | | | | | | | | YFC | | | | | |
| H5S19- | QIQLVQS | 247 | GYTFTNF | 339 | VNWVKQA | 424 | INTYTGE | 513 | TYADDFK | 649 | ARSYYAN | 780 | WGQGTTL | 856 |
| 8AH | GPELKKP | | G | | PGKGLKW | | P | | GRFAFSL | | NAY | | TVSS | |
| | GETVKIS | | | | MGW | | | | ETSASTA | | | | | |
| | CKAS | | | | | | | | YLRINNL | | | | | |
| | | | | | | | | | KNEDTAS | | | | | |
| | | | | | | | | | YFC | | | | | |
| ITI_ | QIQLVQS | 247 | GYTFTNF | 339 | VNWVKQA | 424 | INTYTGE | 513 | TYADDFK | 647 | ARSFYKN | 779 | WGQSTIL | 864 |
| 03 | GPELKKP | | G | | PGKGLKW | | P | | GRFAFSL | | YAF | | TVSS | |
| 2H | GETVKIS | | | | MGW | | | | ETSASTA | | | | | |
| | CKAS | | | | | | | | YLRINNL | | | | | |
| | | | | | | | | | KNEDTAT | | | | | |
| | | | | | | | | | YFC | | | | | |
| ITI_ | QIQLVQS | 247 | GYTFTNF | 339 | VNWVKQA | 424 | INTYTGE | 513 | TYADDFK | 647 | ARSYYGN | 781 | WGQGTTL | 856 |
| 03 | GPELKKP | | G | | PGKGLKW | | P | | GRFAFSL | | YAY | | TVSS | |
| 5H | GETVKIS | | | | MGW | | | | ETSASTA | | | | | |
| | CKAS | | | | | | | | YLRINNL | | | | | |
| | | | | | | | | | KNEDTAT | | | | | |
| | | | | | | | | | YFC | | | | | |
| ITI_ | QIQLVQS | 247 | GYTFTNY | 338 | MNWVKQA | 426 | INTYTGE | 513 | TYADDFK | 650 | ARSFTTA | 782 | WGQGTTL | 856 |
| 08 | GPELKKP | | G | | PGKGLKW | | P | | GRFAFSL | | TCY | | TVSS | |
| 2H | GETVKIS | | | | MGW | | | | ETSASTA | | | | | |
| | CKAS | | | | | | | | YLQINNL | | | | | |
| | | | | | | | | | KNEDTAT | | | | | |
| | | | | | | | | | YFC | | | | | |
| ITI_ | QIQLVQS | 247 | GYTFTNY | 338 | MNWVKQA | 426 | INTYTGE | 513 | TYDDDFK | 651 | ARSFTTA | 782 | WGQGTTL | 856 |
| 08 | GPELKKP | | G | | PGKGLKW | | P | | GRFAFSL | | TCY | | TVSS | |
| 3H | GETVKIS | | | | MGW | | | | ETSASTA | | | | | |
| | CKAS | | | | | | | | YLQINNL | | | | | |
| | | | | | | | | | KNEDTAT | | | | | |
| | | | | | | | | | YFC | | | | | |
| | | Seq. | | Seq. | | Seq. | | Seq. | | Seq. | | Seq. | | Seq. |
| | FR1 | ID | CDR1 | ID | FR2 | ID | CDR2 | ID | FR3 | ID | CDR3 | ID | FR4 ID | ID |

Consensus Cluster #15

| | | | | | | | | | [Y/S/N/ | | | | | |
|---|---|---|---|---|---|---|---|---|---|---|---|---|---|---|
| | | | | | | | | | D][Y/C] | | | | | |
| | | | | | | | | | [P/N/A] | | | | | |
| | | | | | | | | | [D/Q/E/ | | | | | |
| | | | | | | | | | A][S/K/ | | | | | |
| | | | | | | | | | T/A][V/ | | | | | |
| | | | | | | | | | F][K/M/ | | | | | |
| | | | | | | | | | T][G/S/ | | | | | |
| | | | | | | | | | D][R/K] | | | | | |
| | | | | | | | | | [F/A/L] | | | | | |
| | | | | | | | | | [T/S][I | | | | | |
| | | | | | | | | | /F/L][S | | | | | |
| | | | | | | | | | /T][R/V | | | | | |
| | [E/-/Q] | | | | | | | | /S/K]D[ | | | | | |
| | [V/-][Q | | | | | | | | N/T/K/D | | | | | |
| | /-/K][L | | | | | | | | ][A/S][ | | [A/V][R | | | |
| | /-][V/- | | | | | | | | K/S/R/Q | | /K][Q/T | | | |
| | /Q/K][E | | | | | | | | ][N/S][ | | /H/A/G/ | | | |
| | /-/Q][S | | | | | | | | T/I/Q/M | | N/E][G/ | | | |
| | /-/T][G | | | | [M/V][S | | | | ][L/A/V | | Y/R][G/ | | | |
| | /-][G/- | | | | /H/N]WV | | | | ][Y/F][ | | Y/L][H/ | | | |
| | /P][D/- | | | | [R/K]Q[ | | | | L/M/F][ | | Y/R][G/ | | | |
| | /G/E]LV | | | | T/S/K/A | | I[S/N/W | | Q/E/D/K | | R][-/S/ | | | |
| | [K/Q][P | | | | ][P/H][ | | /R][S/C | | ][M/F/L | | N/G/E][ | | | |
| | /T][G/S | | | | D/G/E][ | | /N/P/R] | | ][S/N][ | | -/S/T/N | | | |
| | /K][G/A | | G[F/Y][ | | K/Q][R/ | | [G/Y/K] | | S/R/N]L | | ][N/S/Y | | | |
| | /Q]S[L/ | | T/S/K][ | | S/G][L/ | | [-/S][- | | [K/T/R/ | | /F/G/D] | | | |
| | V][K/S] | | F/L][S/ | | P]EW[V/ | | /N][G/N | | Q][S/A/ | | [Y/N/V/ | | | |
| | [L/I/M] | | T/N][S/ | | I/L][A/ | | /-][S/G | | T][E/D] | | L][G/Y/ | | | |
| | [S/T]C[ | | G/T][Y/ | | G][T/Y/ | | /D/Y][Y | | D[T/S]A | | P][A/S/ | | WGQGT[S | |
| | A/K/T][ | | N][G/Y/ | | D/S/V/E | | /A/S/D] | | [M/V/I] | | Y][M/L/ | | /T][V/L | |
| | A/V]S | 248 | T/V/A] | 340 | /R] | 427 | T | 514 | YYC | 652 | F]DY | 783 | ]TVSS | 857 |
| H5S14- | EVQLVET | 249 | GFTFNTN | 341 | MNWVRQA | 428 | IRSKSNN | 515 | YYADSVK | 653 | VREGGYG | 784 | WGQGTTL | 856 |
| 18AH | GGGLVQP | | A | | PGKGLEW | | YAT | | DRFTISR | | --NYPYF | | TVSS | |
| | KGSLKLS | | | | VAR | | | | DDSQSML | | DY | | | |
| | CAAS | | | | | | | | YLQMNNL | | | | | |
| | | | | | | | | | KTEDTAM | | | | | |
| | | | | | | | | | YYC | | | | | |
| H5S14- | ------- | 250 | GYSFTGY | 342 | MHWVKQS | 429 | ISCY--N | 516 | SYNQKFK | 654 | ARTYYYG | 785 | WGQGTSV | 848 |
| 23AH | --- | | Y | | HGKSLEW | | GAT | | GKATFTV | | S-SYGAM | | TVSS | |
| | LVKTGAS | | | | IGY | | | | DTSSSTA | | DY | | | |
| | VKISCKA | | | | | | | | YMQFNSL | | | | | |
| | S | | | | | | | | TSEDSAV | | | | | |
| | | | | | | | | | YYC | | | | | |
| H5S14- | EVQLVES | 251 | GFTFSSY | 343 | MSWVRQT | 430 | ISSG--G | 517 | YYPDSVK | 655 | ARQGGHG | 786 | WGQGTSV | 848 |
| 30AH | GGDLVKP | | G | | PDKRLEW | | SYT | | GRFTISR | | NYGAMDY | | TVSS | |
| | GGSLKLS | | | | VAT | | | | DNAKNTL | | | | | |
| | CAAS | | | | | | | | YLQMSSL | | | | | |
| | | | | | | | | | KSEDTAM | | | | | |
| | | | | | | | | | YYC | | | | | |
| H5S15- | EVQLQQS | 231 | GYTFTSY | 344 | MHWVKQK | 402 | INPY--N | 518 | NCNEKFK | 656 | AKARGYG | 787 | WGQGTSV | 848 |
| 14AH | GPELVKP | | V | | PGQGLEW | | DDT | | GKATLTS | | STFYYSM | | TVSS | |
| | GASVKMS | | | | IGY | | | | DKSSSTA | | DY | | | |
| | CKAS | | | | | | | | YMELSRL | | | | | |
| | | | | | | | | | TSEDSAV | | | | | |
| | | | | | | | | | YYC | | | | | |
| H5S15- | EVQLQQS | 231 | GYKFNSY | 345 | MHWVKQK | 431 | INPY--N | 518 | NCNEKFK | 657 | AKARGYG | 788 | WGQGTSV | 848 |
| 25AH | GPELVKP | | V | | PGQGPEW | | DDT | | GKATLTS | | GNFYYSM | | TVSS | |
| | GASVKMS | | | | IGY | | | | DKSSSTA | | DY | | | |
| | CKAS | | | | | | | | YMELSSL | | | | | |
| | | | | | | | | | TSEDSAV | | | | | |
| | | | | | | | | | YYC | | | | | |
| H5S15- | EVQLQQS | 231 | GYTFTSY | 344 | MHWVKQK | 402 | INPY--N | 518 | NCNEKFK | 658 | AKARGYG | 789 | WGQGTSV | 848 |
| 5AH | GPELVKP | | V | | PGQGLEW | | DDT | | GKATLTS | | GSFYYSM | | TVSS | |
| | GASVKMS | | | | IGY | | | | DKSSSTA | | DY | | | |
| | CKAS | | | | | | | | YMDLSSL | | | | | |
| | | | | | | | | | TSEDSAV | | | | | |
| | | | | | | | | | YYC | | | | | |
| H5S20- | EVKLVES | 252 | GFTFSSY | 346 | MSWVRQT | 419 | ISNG--G | 519 | YYPDTVK | 639 | ARHRGYG | 790 | WGQGTSV | 848 |
| 44AH | GGGLVQP | | T | | PEKRLEW | | GST | | GRFTISR | | SSYNYAM | | TVSS | |
| | GGSLKLS | | | | VAY | | | | DNAKNTL | | DY | | | |
| | CAAS | | | | | | | | YLQMSSL | | | | | |
| | | | | | | | | | KSEDTAM | | | | | |
| | | | | | | | | | YYC | | | | | |
| H5S20- | EVKLVES | 252 | GFTFSSY | 346 | MSWVRQT | 419 | ISNG--G | 519 | YYPDTVK | 639 | ARHRGYG | 791 | WGQGTSV | 848 |
| 46AH | GGGLVQP | | T | | PEKRLEW | | GST | | GRFTISR | | N-YVYAM | | TVSS | |
| | GGSLKLS | | | | VAY | | | | DNAKNTL | | DY | | | |
| | CAAS | | | | | | | | YLQMSSL | | | | | |
| | | | | | | | | | KSEDTAM | | | | | |
| | | | | | | | | | YYC | | | | | |
| H5S20- | QVQLKQS | 225 | GFSLTSY | 306 | VHWVRQS | 396 | IWRG--- | 520 | DYNAAFM | 659 | AKNRGYG | 792 | WGQGTSV | 848 |
| 51AH | GPGLVQP | | G | | PGKGLEW | | GST | | SRLSITK | | E-GYYAM | | TVSS | |
| | SQSLSIT | | | | LGV | | | | DNSKSQV | | DY | | | |
| | CTVS | | | | | | | | FFKMNSL | | | | | |
| | | | | | | | | | QADDTAI | | | | | |
| | | | | | | | | | YYC | | | | | |
| H5S20- | EVQLVES | 234 | GFTFSSY | 303 | MSWVRQS | 432 | ISSG--G | 517 | YYPDTVT | 660 | AREGLRR | 793 | WGQGTSV | 848 |
| 53AH | GGGLVKP | | A | | PEKRLEW | | SYT | | GRFTISR | | --DYYAL | | TVSS | |
| | GGSLKLS | | | | VAE | | | | DNAKNTL | | DY | | | |
| | CAAS | | | | | | | | YLEMSSL | | | | | |
| | | | | | | | | | RSEDTAM | | | | | |
| | | | | | | | | | YYC | | | | | |
| H5S20- | EVKLVES | 252 | GFTFSSY | 346 | MSWVRQT | 433 | ISNG--G | 519 | YYPDTVK | 639 | ARHRGYG | 791 | WGQGTSV | 848 |
| 55AH | GGGLVQP | | T | | PEKRLEW | | GST | | GRFTISR | | N-YVYAM | | TVSS | |
| | GGSLKLS | | | | VAD | | | | DNAKNTL | | DY | | | |
| | CAAS | | | | | | | | YLQMSSL | | | | | |
| | | | | | | | | | KSEDTAM | | | | | |
| | | | | | | | | | YYC | | | | | |
| H5S20- | EVKLVES | 215 | GFTFSSY | 303 | MSWVRQT | 385 | ISSG--- | 521 | YYPDSVK | 661 | AKGRGYG | 794 | WGQGTSV | 848 |
| 59AH | GGGLVKP | | A | | PEKRLEW | | SST | | GRFTISR | | N-YLYAM | | TVSS | |
| | GGSLKLS | | | | VAS | | | | DNARNIL | | DY | | | |
| | CAAS | | | | | | | | YLQMSSL | | | | | |
| | | | | | | | | | RSEDTAM | | | | | |
| | | | | | | | | | YYC | | | | | |
| | | Seq. | | Seq. | | Seq. | | Seq. | | Seq. | | Seq. | | Seq. |
| | FR1 | ID | CDR1 | ID | FR2 | ID | CDR2 | ID | FR3 | ID | CDR3 | ID | FR4 ID | ID |

Consensus Cluster #19

| | | | | | | | | | [D/T]Y[ | | | | | |
|---|---|---|---|---|---|---|---|---|---|---|---|---|---|---|
| | | | | | | | | | N/A][S/ | | | | | |
| | | | | | | | | | D/G][A/ | | | | | |
| | | | | | | | | | D][L/F] | | | | | |
| | | | | | | | | | K[S/G]R | | | | | |
| | | | | | | | | | [L/F][S | | | | | |
| | | | | | | | | | /A][I/F | | | | | |
| | | | | | | | | | ]S[K/L] | | | | | |
| | | | | | | | | | [D/E][N | | | | | |
| | Q[V/I]Q | | | | | | | | /T]S[K/ | | | | | |
| | L[K/V][ | | | | | | | | A]S[Q/T | | | | | |
| | E/Q]SGP | | | | | | | | ][V/I/A | | | | | |
| | [G/E]L[ | | | | | | | | ][F/Y]L | | [A/V]R[ | | | |
| | V/K][A/ | | | | [V/M]NW | | | | [K/Q][M | | D/S][N/ | | | |
| | K]P[S/G | | | | [V/M][R | | | | /I]N[S/ | | S/Y/L/F | | | |
| | ][Q/E][ | | | | /K]Q[P/ | | | | N][L/V] | | ]Y[H/R/ | | | |
| | S/T][L/ | | G[F/Y][ | | S/A]PGK | | I[W/N][ | | [Q/K][T | | -]IT/-] | | | |
| | V][S/K] | | S/T/I][ | | [G/D]L[ | | G/T][D/ | | /N][D/E | | [V/M/-] | | | |
| | I[T/S]C | | L/F]T[G | | E/K]W[L | | Y][-/T] | | ]D[T/M] | | [V/T/G] | | WGQGT[S | |
| | [T/K][V | | /N][Y/F | | /M]G[M/ | | G[G/S/E | | A[R/T]Y | | N[G/S/R | | /T][V/L | |
| | /A]S | 253 | ]G | 347 | W] | 434 | ][T/P] | 522 | [Y/F]C | 662 | ][D/G]Y | 795 | ]TVSS | 857 |
| H5S15- | QVQLKES | 220 | GFSLTGY | 348 | VNWVRQP | 435 | IWGD-GG | 523 | DYNSALK | 663 | ARDNYHT | 796 | WGQGTSV | 848 |
| 19AH | GPGLVAP | | G | | PGKGLEW | | T | | SRLSISK | | VVNGDY | | TVSS | |
| | SQSLSIT | | | | LGM | | | | DNSKSQV | | | | | |
| | CTVS | | | | | | | | FLKMNSL | | | | | |
| | | | | | | | | | QTDDTAR | | | | | |
| | | | | | | | | | YYC | | | | | |
| H5S15- | QVQLKES | 220 | GFSLTGY | 348 | VNWVRQS | 436 | IWGD-GS | 524 | DYNSALK | 664 | ARDSYRT | 797 | WGQGTSV | 848 |
| 32AH | GPGLVAP | | G | | PGKGLEW | | T | | SRLSISK | | MTNGDY | | TVSS | |
| | SQSLSIT | | | | LGM | | | | DNSKSQI | | | | | |
| | CTVS | | | | | | | | FLKMNSV | | | | | |
| | | | | | | | | | QTEDTAR | | | | | |
| | | | | | | | | | YYC | | | | | |
| H5S19- | QIQLVQS | 247 | GYTFTNF | 339 | VNWVKQA | 424 | INTYTGE | 513 | TYADDFK | 650 | VRSYY-- | 798 | WGQGTTL | 856 |
| 16AH | GPELKKP | | G | | PGKGLKW | | P | | GRFAFSL | | -GNSGY | | TVSS | |
| | GETVKIS | | | | MGW | | | | ETSASTA | | | | | |
| | CKAS | | | | | | | | YLQINNL | | | | | |
| | | | | | | | | | KNEDTAT | | | | | |
| | | | | | | | | | YFC | | | | | |
| H5S19- | QIQLVQS | 247 | GYTFTNY | 338 | MNWVKQA | 426 | INTYTGE | 513 | TYADDFK | 650 | VRSYY-- | 798 | WGQGTTL | 856 |
| 19AH | GPELKKP | | G | | PGKGLKW | | P | | GRFAFSL | | -GNSGY | | TVSS | |
| | GETVKIS | | | | MGW | | | | ETSASTA | | | | | |
| | CKAS | | | | | | | | YLQINNL | | | | | |
| | | | | | | | | | KNEDTAT | | | | | |
| | | | | | | | | | YFC | | | | | |
| H5S20- | QIQLVQS | 247 | GYTFTNF | 339 | MNWVRQA | 437 | INTYTGE | 513 | TYADDFK | 665 | ARSLY-- | 799 | WGQGTTL | 856 |
| 12AH | GPELKKP | | G | | PGKGLKW | | P | | GRFAFSL | | -GNRDY | | TVSS | |
| | GETVKIS | | | | MGW | | | | ETSASTA | | | | | |
| | CKAS | | | | | | | | YLQINNL | | | | | |
| | | | | | | | | | KNDDMAT | | | | | |
| | | | | | | | | | YFC | | | | | |
| H5S20- | QIQLVQS | 247 | GYIFTNY | 349 | MNWVRQA | 437 | INTYTGE | 513 | TYADDFK | 645 | ARSFY-- | 800 | WGQGTTL | 856 |
| 18AH | GPELKKP | | G | | PGKGLKW | | P | | GRFAFSL | | -GNRDY | | TVSS | |
| | GETVKIS | | | | MGW | | | | ETSASTA | | | | | |
| | CKAS | | | | | | | | YLQINNL | | | | | |
| | | | | | | | | | KNEDMAT | | | | | |
| | | | | | | | | | YFC | | | | | |
| ITI_ | QIQLVQS | 247 | GYTLTNF | 350 | MNWMKQA | 438 | INTYTGE | 513 | TYAGDFK | 666 | VRSYY-- | 798 | WGQGTTL | 856 |
| 10 | GPELKKP | | G | | PGKGLKW | | P | | GRFAFSL | | -GNSGY | | TVSS | |
| 0H | GETVKIS | | | | MGW | | | | ETSASTA | | | | | |
| | CKAS | | | | | | | | YLQINNL | | | | | |
| | | | | | | | | | KNEDTAT | | | | | |
| | | | | | | | | | YFC | | | | | |
| ITI_ | QIQLVQS | 247 | GYTLTNF | 350 | MNWMKQA | 439 | INTYTGE | 513 | TYAGDFK | 666 | VRSYY-- | 798 | WGQGTTL | 856 |
| 10 | GPELKKP | | G | | PGKDLKW | | P | | GRFAFSL | | -GNSGY | | TVSS | |
| 1H | GETVKIS | | | | MGW | | | | ETSASTA | | | | | |
| | CKAS | | | | | | | | YLQINNL | | | | | |
| | | | | | | | | | KNEDTAT | | | | | |
| | | | | | | | | | YFC | | | | | |
| | | Seq. | | Seq. | | Seq. | | Seq. | | Seq. | | Seq. | | Seq. |
| | FR1 | ID | CDR1 | ID | FR2 | ID | CDR2 | ID | FR3 | ID | CDR3 | ID | FR4 ID | ID |

Consensus Cluster #14

| | | | | | | | | | [T/K/D/ | | | | | |
|---|---|---|---|---|---|---|---|---|---|---|---|---|---|---|
| | | | | | | | | | S]Y[A/N | | | | | |
| | | | | | | | | | ][D/E/A | | | | | |
| | | | | | | | | | /Q][D/K | | | | | |
| | | | | | | | | | /A]F[K/ | | | | | |
| | | | | | | | | | M][G/S] | | | | | |
| | | | | | | | | | [R/K][L | | | | | |
| | | | | | | | | | /A/F][A | | | | | |
| | | | | | | | | | /K/S/T] | | | | | |
| | | | | | | | | | [F/L/I] | | | | | |
| | | | | | | | | | [S/T][L | | | | | |
| | | | | | | | | | /V/K/S] | | | | | |
| | | | | | | | | | [E/D][T | | | | | |
| | [Q/E][I | | | | | | | | /K/N/E] | | | | | |
| | /V]QL[V | | | | | | | | S[A/S/K | | | | | |
| | /Q/K]Q[ | | | | | | | | ]S[T/Q] | | | | | |
| | S/P]G[P | | | | [M/I/V] | | | | [A/V][F | | | | | |
| | /A][E/G | | | | [H/E/N] | | | | /Y][L/F | | | | | |
| | ]L[K/V] | | | | W[V/M][ | | | | /M][Q/E | | A[N/R/K | | | |
| | [K/Q/M] | | | | K/R]Q[A | | [I/F][N | | /K][I/L | | ][W/G/T | | | |
| | P[G/S][ | | | | /N/S/K/ | | /H/W/D] | | /M][N/S | | /E/S][A | | | |
| | E/A/Q][ | | | | R][P/H] | | [T/P/R] | | ][N/R/S | | /G/R/L] | | | |
| | T/S][V/ | | G[Y/F][ | | G[K/Q][ | | [E/Y/G/ | | ]L[K/T/ | | [-/T/L/ | | | |
| | L][K/S] | | T/S][F/ | | G/S]L[K | | S][T/N/ | | Q][N/S/ | | R][-/R/ | | | |
| | [I/M][S | | L]T[D/T | | /E]W[M/ | | -/D][G/ | | A][E/D] | | A][-/S] | | | |
| | /T]C[K/ | | /S/N]Y[ | | I/L]G[W | | D/S][E/ | | D[T/S]A | | [-/G/A] | | | |
| | T][A/V] | | S/P/G/V | | /N/V/Y/ | | D/S/G/Y | | [T/V/I] | | [G/-/P/ | | WGQGTLV | |
| | [S/F] | 254 | /W] | 351 | A] | 440 | ][P/T | 525 | Y[F/Y]C | 667 | W]FAY | 801 | TVSA | 852 |
| H5S15- | QVQLKQS | 225 | GFSLTSY | 306 | VHWVRQS | 396 | IWRG-GS | 526 | DYNAAFM | 659 | AKTG--- | 802 | WGQGTLV | 852 |
| 13AH | GPGLVQP | | G | | PGKGLEW | | T | | SRLSITK | | FAY | | TVSA | |
| | SQSLSIT | | | | LGV | | | | DNSKSQV | | | | | |
| | CTVS | | | | | | | | FFKMNSL | | | | | |
| | | | | | | | | | QADDTAI | | | | | |
| | | | | | | | | | YYC | | | | | |
| H5S15- | QVQLQQS | 227 | GYTFTTY | 352 | IEWMKQN | 398 | FHPYNDD | 527 | KYNEKFK | 609 | ARGG--- | 803 | WGQGTLV | 852 |
| 28AH | GAELVKP | | P | | HGKSLEW | | T | | GKAKLTV | | FAY | | TVSA | |
| | GASVKMS | | | | IGN | | | | EKSSSTV | | | | | |
| | CKAF | | | | | | | | YLELSRL | | | | | |
| | | | | | | | | | TSDDSAV | | | | | |
| | | | | | | | | | YYC | | | | | |
| H5S15- | QIQLVQS | 247 | GYTFTDY | 353 | MHWVKQA | 441 | INTETGE | 528 | TYADDFK | 668 | ANWA--- | 804 | WGQGTLV | 852 |
| 39AH | GPELKKP | | S | | PGKGLKW | | P | | GRLAFSL | | -GFAY | | TVSA | |
| | GETVKIS | | | | MGW | | | | ETSASTA | | | | | |
| | CKAS | | | | | | | | FLQINNL | | | | | |
| | | | | | | | | | KNEDTAT | | | | | |
| | | | | | | | | | YFC | | | | | |
| ITI_ | EVQLQQS | 231 | GYTFTSY | 344 | MHWVKQK | 402 | INPYNDG | 508 | KYNEKFK | 613 | ARERT-- | 805 | WGQGTLV | 852 |
| 23 | GPELVKP | | V | | PGQGLEW | | T | | GKATLTS | | GPFAY | | TVSA | |
| 6H | GASVKMS | | | | IGY | | | | DKSSSTA | | | | | |
| | CKAS | | | | | | | | YMELSSL | | | | | |
| | | | | | | | | | TSEDSAV | | | | | |
| | | | | | | | | | YYC | | | | | |
| ITI_ | QVQLQQP | 255 | GYTFTDY | 354 | MHWVKQR | 442 | IDTSDSY | 529 | SYNQKFK | 669 | ARSARA- | 806 | WGQGTLV | 852 |
| 23 | GAELVMP | | W | | PGQGLEW | | T | | GKATLTV | | AWFAY | | TVSA | |
| 8H | GASVKMS | | | | IGA | | | | DESSSTA | | | | | |
| | CKAS | | | | | | | | YMQLSSL | | | | | |
| | | | | | | | | | TSEDSAV | | | | | |
| | | | | | | | | | YYC | | | | | |
| ITI_ | QIQLVQS | 247 | GYTFTNY | 338 | MNWVKQA | 426 | INTYTGE | 513 | TYADDFK | 670 | ARELLRS | 807 | WGQGTLV | 852 |
| 24 | GPELKKP | | G | | PGKGLKW | | P | | GRFAFSL | | AWFAY | | TVSA | |
| 0H | GETVKIS | | | | MGW | | | | ETSASTA | | | | | |
| | CKAS | | | | | | | | YLQINNL | | | | | |
| | | | | | | | | | KNDDTAT | | | | | |
| | | | | | | | | | YFC | | | | | |
| | | Seq. | | Seq. | | Seq. | | Seq. | | Seq. | | Seq. | | Seq. |
| | FR1 | ID | CDR1 | ID | FR2 | ID | CDR2 | ID | FR3 | ID | CDR3 | ID | FR4 ID | ID |

Consensus Cluster #6

| | | | | | | | | | E[F/Y]A | | | | | |
|---|---|---|---|---|---|---|---|---|---|---|---|---|---|---|
| | | | | | | | | | PKFQGKA | | | | | |
| | | | | | | | | | T[L/M]T | | | | | |
| | EVQLQQS | | | | | | | | ADT[S/C | | | | | |
| | GAELVRS | | | | | | | | ]SN[T/A | | | | | |
| | GASVKLS | | | | MHWVKQR | | | | ]AYLQLS | | | | | |
| | C[A/T][ | | GFNIKDY | | PEQGLEW | | IDPENGD | | SLTSEDT | | N[T/S]R | | WGQGTLV | |
| | A/T]S | 256 | Y | 355 | IGW | 443 | T | 530 | AVYYC | 671 | TLGY | 808 | TVSA | 852 |
| H5S20- | EVQLQQS | 257 | GFNIKDY | 355 | MHWVKQR | 443 | IDPENGD | 530 | EYAPKFQ | 672 | NSRTLGY | 809 | WGQGTLV | 852 |
| 20AH | GAELVRS | | Y | | PEQGLEW | | T | | GKATMTA | | | | TVSA | |
| | GASVKLS | | | | IGW | | | | DTSSNAA | | | | | |
| | CTAS | | | | | | | | YLQLSSL | | | | | |
| | | | | | | | | | TSEDTAV | | | | | |
| | | | | | | | | | YYC | | | | | |
| H5S20- | EVQLQQS | 257 | GFNIKDY | 355 | MHWVKQR | 443 | IDPENGD | 530 | EYAPKFQ | 673 | NSRTLGY | 809 | WGQGTLV | 852 |
| 20BH | GAELVRS | | Y | | PEQGLEW | | T | | GKATMTA | | | | TVSA | |
| | GASVKLS | | | | IGW | | | | DTSSNTA | | | | | |
| | CTAS | | | | | | | | YLQLSSL | | | | | |
| | | | | | | | | | TSEDTAV | | | | | |
| | | | | | | | | | YYC | | | | | |
| H5S20- | EVQLQQS | 258 | GFNIKDY | 355 | MHWVKQR | 443 | IDPENGD | 530 | EYAPKFQ | 673 | NSRTLGY | 809 | WGQGTLV | 852 |
| 31AH | GAELVRS | | Y | | PEQGLEW | | T | | GKATMTA | | | | TVSA | |
| | GASVKLS | | | | IGW | | | | DTSSNTA | | | | | |
| | CTTS | | | | | | | | YLQLSSL | | | | | |
| | | | | | | | | | TSEDTAV | | | | | |
| | | | | | | | | | YYC | | | | | |
| H5S20- | EVQLQQS | 258 | GFNIKDY | 355 | MHWVKQR | 443 | IDPENGD | 530 | EYAPKFQ | 674 | NSRTLGY | 809 | WGQGTLV | 852 |
| 31BH | GAELVRS | | Y | | PEQGLEW | | T | | GKATMTA | | | | TVSA | |
| | GASVKLS | | | | IGW | | | | DTCSNTA | | | | | |
| | CTTS | | | | | | | | YLQLSSL | | | | | |
| | | | | | | | | | TSEDTAV | | | | | |
| | | | | | | | | | YYC | | | | | |
| H5S20- | EVQLQQS | 259 | GFNIKDY | 355 | MHWVKQR | 443 | IDPENGD | 530 | EFAPKFQ | 675 | NTRTLGY | 810 | WGQGTLV | 852 |
| 45AH | GAELVRS | | Y | | PEQGLEW | | T | | GKATLTA | | | | TVSA | |
| | GASVKLS | | | | IGW | | | | DTSSNTA | | | | | |
| | CAAS | | | | | | | | YLQLSSL | | | | | |
| | | | | | | | | | TSEDTAV | | | | | |
| | | | | | | | | | YYC | | | | | |
| | | Seq. | | Seq. | | Seq. | | Seq. | | Seq. | | Seq. | | Seq. |
| | FR1 | ID | CDR1 | ID | FR2 | ID | CDR2 | ID | FR3 | ID | CDR3 | ID | FR4 ID | ID |

Consensus Cluster #12

| | | | | | | | | | [F/D/N] | | | | | |
|---|---|---|---|---|---|---|---|---|---|---|---|---|---|---|
| | | | | | | | | | Y[P/N/Y | | | | | |
| | | | | | | | | | ][D/S/E | | | | | |
| | | | | | | | | | ][S/A/K | | | | | |
| | | | | | | | | | ][V/L/F | | | | | |
| | | | | | | | | | ]K[G/S/ | | | | | |
| | | | | | | | | | V][R/K] | | | | | |
| | | | | | | | | | [F/L/A] | | | | | |
| | | | | | | | | | [T/S][I | | | | | |
| | | | | | | | | | /L][S/T | | | | | |
| | | | | | | | | | ][R/K/A | | | | | |
| | | | | | | | | | ]D[N/T] | | | | | |
| | [E/Q]V[ | | | | | | | | [A/S][K | | | | | |
| | K/Q]L[V | | | | | | | | /S][N/S | | | | | |
| | /K/Q][E | | | | | | | | ][N/Q/T | | | | | |
| | /Q]SG[G | | | | | | | | ][L/V/A | | | | | |
| | /P/A][G | | | | | | | | ][Y/F][ | | | | | |
| | /E]LV[K | | | | [M/V/I] | | | | L/M][Q/ | | | | | |
| | /A/R]P[ | | | | [S/N/G] | | | | K][V/M/ | | | | | |
| | G/S][G/ | | | | WV[R/K] | | | | L][S/N] | | | | | |
| | Q/T]S[L | | | | Q[T/P/R | | | | [S | | | | | |
| | /V][K/S | | G[F/Y][ | | ]P[E/G] | | I[S/W/Y | | /R]L[R/ | | | | | |
| | ][L/I/M | | T/S][F/ | | [K/H][R | | ][G/P][ | | Q/T][S/ | | [I/A][Y | | | |
| | ][S/T]C | | L][S/T] | | /G]LEW[ | | G/D][G/ | | T][E/D] | | /R/S][D | | WGQGT[L | |
| | [A/T/K] | | [S/G/D/ | | V/L/I][ | | -][S/G] | | D[T/S]A | | /S][-/Y | | /T][V/L | |
| | [A/V][S | | N][Y]S] | | A/G][T/ | | [Y/N][T | | [L/R/I] | | ]G[S/A] | | ]TVS[A/ | |
| | /A] | 260 | [G/W] | 356 | M/D] | 444 | /S] | 531 | YYC | 676 | Y | 811 | S] | 865 |
| H5S15- | QVQLQQS | 226 | GYTFTNS | 289 | IGWVKQR | 397 | IYPGGGY | 468 | NYYEKFK | 677 | ASS-GAY | 812 | WGQGTTL | 856 |
| 18AH | GAELVRP | | W | | PGHGLEW | | T | | VKATLTA | | | | TVSS | |
| | GTSVKMS | | | | IGD | | | | DTSSSTA | | | | | |
| | CKAA | | | | | | | | YMQLSSL | | | | | |
| | | | | | | | | | TSEDSAI | | | | | |
| | | | | | | | | | YYC | | | | | |
| H5S15- | QVQLQQS | 226 | GYTFTNS | 289 | MGWVKQR | 445 | IYPGGGY | 532 | NYNEKFK | 608 | ASS-GAY | 812 | WGQGTTL | 856 |
| 26AH | GAELVRP | | W | | PGHGLEW | | S | | GKATLTA | | | | TVSS | |
| | GTSVKMS | | | | IAD | | | | DTSSSTA | | | | | |
| | CKAA | | | | | | | | YMQLSSL | | | | | |
| | | | | | | | | | TSEDSAI | | | | | |
| | | | | | | | | | YYC | | | | | |
| H5S15- | QVQLQQS | 226 | GYTFTDS | 357 | IGWVKQR | 397 | IYPGGGY | 468 | NYNEKFK | 678 | ASS-GAY | 812 | WGQGTTL | 856 |
| 8AH | GAELVRP | | W | | PGHGLEW | | T | | GKATLTA | | | | TVSS | |
| | GTSVKMS | | | | IGD | | | | DTSSSTA | | | | | |
| | CKAA | | | | | | | | YMQLSRL | | | | | |
| | | | | | | | | | TSEDSAI | | | | | |
| | | | | | | | | | YYC | | | | | |
| H5S19- | QVQLKES | 220 | GFSLTGY | 348 | VNWVRQP | 435 | IWGD-GN | 533 | DYNSALK | 663 | ARSYGSY | 813 | WGQGTLV | 852 |
| 4AH | GPGLVAP | | G | | PGKGLEW | | T | | SRLSISK | | | | TVSA | |
| | SQSLSIT | | | | LGM | | | | DNSKSQV | | | | | |
| | CTVS | | | | | | | | FLKMNSL | | | | | |
| | | | | | | | | | QTDDTAR | | | | | |
| | | | | | | | | | YYC | | | | | |
| H5S20- | EVKLVES | 215 | GFTFSSY | 343 | MSWVRQT | 446 | ISGGGSY | 534 | FYPDSVK | 679 | IYD-GSY | 814 | WGQGTLV | 852 |
| 56AH | GGGLVKP | | G | | PEKRLEW | | T | | GRFTISR | | | | TVSA | |
| | GGSLKLS | | | | VAT | | | | DNAKNNL | | | | | |
| | CAAS | | | | | | | | YLQVSSL | | | | | |
| | | | | | | | | | RSEDTAL | | | | | |
| | | | | | | | | | YYC | | | | | |
| | | Seq. | | Seq. | | Seq. | | Seq. | | Seq. | | Seq. | | Seq. |
| | FR1 | ID | CDR1 | ID | FR2 | ID | CDR2 | ID | FR3 | ID | CDR3 | ID | FR4 ID | ID |

Consensus Cluster #4

| | | | | | | | | | INNQKFK | | | | | |
|---|---|---|---|---|---|---|---|---|---|---|---|---|---|---|
| | EVQLQQS | | | | | | | | [G/D]KA | | | | | |
| | GPELVKP | | | | | | | | TLTVDMS | | | | | |
| | G[A/T]S | | | | MHWVKQS | | | | SSTAYME | | | | | |
| | VKISCKT | | GYT[F/I | | HGKSLEW | | INP[Y/N | | LRSLTSE | | AGSVVDR | | WGAGTTV | |
| | S | 261 | ]TEYT | 358 | IGG | 447 | ]NGGT | 535 | DSAVYYC | 680 | YWYFDV | 815 | TVSS | 866 |
| H5S14- | EVQLQQS | 262 | GYTITEY | 359 | MHWVKQS | 447 | INPNNGG | 536 | INNQKFK | 681 | AGSVVDR | 815 | WGAGTTV | 866 |
| 24AH | GPELVKP | | T | | HGKSLEW | | T | | DKATLTV | | YWYFDV | | TVSS | |
| | GTSVKIS | | | | IGG | | | | DMSSSTA | | | | | |
| | CKTS | | | | | | | | YMELRSL | | | | | |
| | | | | | | | | | TSEDSAV | | | | | |
| | | | | | | | | | YYC | | | | | |
| H5S14- | EVQLQQS | 263 | GYTFTEY | 360 | MHWVKQS | 447 | INPYNGG | 537 | INNQKFK | 682 | AGSVVDR | 815 | WGAGTTV | 866 |
| 4AH | GPELVKP | | T | | HGKSLEW | | T | | GKATLTV | | YWYFDV | | TVSS | |
| | GASVKIS | | | | IGG | | | | DMSSSTA | | | | | |
| | CKTS | | | | | | | | YMELRSL | | | | | |
| | | | | | | | | | TSEDSAV | | | | | |
| | | | | | | | | | YYC | | | | | |
| H5S14- | EVQLQQS | 263 | GYTFTEY | 360 | MHWVKQS | 447 | INPNNGG | 536 | INNQKFK | 682 | AGSVVDR | 815 | WGAGTTV | 866 |
| 7AH | GPELVKP | | T | | HGKSLEW | | T | | GKATLTV | | YWYFDV | | TVSS | |
| | GASVKIS | | | | IGG | | | | DMSSSTA | | | | | |
| | CKTS | | | | | | | | YMELRSL | | | | | |
| | | | | | | | | | TSEDSAV | | | | | |
| | | | | | | | | | YYC | | | | | |
| ITI_ | EVQLQQS | 262 | GYTFTEY | 360 | MHWVKQS | 447 | INPNNGG | 536 | INNQKFK | 682 | AGSVVDR | 815 | WGAGTTV | 866 |
| 04 | GPELVKP | | T | | HGKSLEW | | T | | GKATLTV | | YWYFDV | | TVSS | |
| 0H | GTSVKIS | | | | IGG | | | | DMSSSTA | | | | | |
| | CKTS | | | | | | | | YMELRSL | | | | | |
| | | | | | | | | | TSEDSAV | | | | | |
| | | | | | | | | | YYC | | | | | |
| | | Seq. | | Seq. | | Seq. | | Seq. | | Seq. | | Seq. | | Seq. |
| | FR1 | ID | CDR1 | ID | FR2 | ID | CDR2 | ID | FR3 | ID | CDR3 | ID | FR4 ID | ID |

Consensus Cluster #9

| | | | | | | | | | [K/R/N] | | | | | |
|---|---|---|---|---|---|---|---|---|---|---|---|---|---|---|
| | | | | | | | | | Y[D/A/N | | | | | |
| | | | | | | | | | ][P/E]K | | | | | |
| | | | | | | | | | F[Q/K][ | | | | | |
| | | | | | | | | | G/D/S]K | | | | | |
| | | | | | | | | | AT[I/L] | | | | | |
| | | | | | | | | | T[A/V]D | | | | | |
| | [E/-/Q] | | | | | | | | [T/K]SS | | AR[S/H] | | | |
| | [V/-][Q | | | | | | | | [N/T/S] | | [R/F/E/ | | | |
| | /-]LQQ[ | | | | | | | | T[A/V]Y | | G][R/G/ | | | |
| | S/P]GA[ | | G[F/Y][ | | [M/I][H | | [I/F][D | | [L/M][Q | | D/Y][-/ | | | |
| | E/G]LVK | | N/T][I/ | | /Y]WVKQ | | /Y]P[A/ | | /D] | | Y][-/G] | | | |
| | PG[A/T] | | F][K/T] | | R[P/S][ | | G][N/S] | | LS[S/R] | | [- | | | |
| | SVK[L/M | | [D/E/S] | | E/G]QGL | | [G/D][N | | LTSED[T | | /N/G/S] | | WG[A/Q] | |
| | ]SC[T/K | | [T/Y][Y | | EWIG[R/ | | /S][T/I | | /S]AVY[ | | Y[F/L]D | | GTT[V/L | |
| | ]AS | 264 | /I/W] | 361 | W/D] | 448 | ] | 538 | Y/F]C | 683 | [V/Y] | 816 | ]TVSS | 867 |
| H5S14- | QVQLQQP | 265 | GYTFTSY | 362 | MHWVKQR | 449 | IYPGSDS | 539 | NYNEKFK | 684 | ARSGYYG | 817 | WGQGTTL | 856 |
| 2AH | GAELVKP | | W | | PGQGLEW | | T | | SKATLTV | | SYLDY | | TVSS | |
| | GTSVKMS | | | | IGD | | | | DTSSSTA | | | | | |
| | CKAS | | | | | | | | YMQLSSL | | | | | |
| | | | | | | | | | TSEDSAV | | | | | |
| | | | | | | | | | YYC | | | | | |
| H5S15- | EVQLQQS | 229 | GFNIKDT | 322 | MHWVKQR | 400 | IDPANGN | 499 | KYDPKFQ | 617 | ARSRR-- | 818 | WGAGTTV | 866 |
| 27AH | GAELVKP | | Y | | PEQGLEW | | T | | GKATITA | | -YFDV | | TVSS | |
| | GASVKLS | | | | IGR | | | | DTSSNTA | | | | | |
| | CTAS | | | | | | | | YLQLSSL | | | | | |
| | | | | | | | | | TSEDTAV | | | | | |
| | | | | | | | | | YYC | | | | | |
| H5S20- | EVQLQQS | 229 | GFNIKDT | 322 | MHWVKQR | 400 | IDPANGN | 499 | KYAPKFQ | 624 | ARSFG-- | 819 | WGQGTTL | 856 |
| 22AH | GAELVKP | | Y | | PEQGLEW | | T | | GKATITA | | NYFDY | | TVSS | |
| | GASVKLS | | | | IGR | | | | DTSSNTA | | | | | |
| | CTAS | | | | | | | | YLQLSSL | | | | | |
| | | | | | | | | | TSEDTAV | | | | | |
| | | | | | | | | | YYC | | | | | |
| ITI_ | LQQSGAG | 266 | GYTFTEY | 363 | IYWVKQR | 450 | FYPGSGS | 540 | RYNEKFK | 685 | ARHED-- | 820 | WGQGTTL | 856 |
| 23 | LVKPGAS | | I | | SGQGLEW | | I | | DKATLTA | | GYLDY | | TVSS | |
| 7H | VKLSCKA | | | | IGW | | | | DKSSTTV | | | | | |
| | S | | | | | | | | YMDLSRL | | | | | |
| | | | | | | | | | TSEDSAV | | | | | |
| | | | | | | | | | YFC | | | | | |
| | | Seq. | | Seq. | | Seq. | | Seq. | | Seq. | | Seq. | | Seq. |
| | FR1 | ID | CDR1 | ID | FR2 | ID | CDR2 | ID | FR3 | ID | CDR3 | ID | FR4 ID | ID |

Consensus Cluster #17

| | | | | | | | | | TYADDFK | | | | | |
|---|---|---|---|---|---|---|---|---|---|---|---|---|---|---|
| | | | | | | | | | GRFAFSL | | ARS[I/L | | | |
| | QIQLVQS | | | | | | | | ETSAS[T | | ][N/Y]Y | | | |
| | GP[D/E] | | | | | | | | /S]AYLQ | | [-/G/V] | | | |
| | [L/V]KK | | | | | | | | I[N/S]N | | [-/N/D] | | | |
| | [P/H]GE | | | | [M/I]NW | | | | L[K/T][ | | [D/N][S | | | |
| | TV[K/R] | | GY[T/I] | | VKQAPGK | | INTYT[G | | N/T][D/ | | /Y][D/E | | WGQGT[S | |
| | ISC[K/R | | FT[N/D] | | [D/G]LK | | /R][E/K | | E]D[T/M | | ][E/A][ | | /L]VTVS | |
| | ]AS | 267 | YG | 364 | WMGW | 451 | ]P | 541 | ]ATYFC | 686 | K/C/Y] | 821 | [S/-/A] | 868 |
| H5S15- | QIQLVQS | 268 | GYTFTNY | 338 | MNWVKQA | 452 | INTYTGE | 513 | TYADDFK | 670 | ARSINY- | 822 | WGQGTSV | 848 |
| 21AH | GPDLKKP | | G | | PGKDLKW | | P | | GRFAFSL | | -DSDEK | | TVSS | |
| | GETVKIS | | | | MGW | | | | ETSASTA | | | | | |
| | CKAS | | | | | | | | YLQINNL | | | | | |
| | | | | | | | | | KNDDTAT | | | | | |
| | | | | | | | | | YFC | | | | | |
| H5S20- | QIQLVQS | 269 | GYTFTNY | 338 | MNWVKQA | 426 | INTYTGE | 513 | TYADDFK | 687 | ARSLYYG | 823 | WGQGTLV | 852 |
| 26AH | GPELKKP | | G | | PGKGLKW | | P | | GRFAFSL | | DNYEAY | | TVSA | |
| | GETVKIS | | | | MGW | | | | ETSASSA | | | | | |
| | CRAS | | | | | | | | YLQINNL | | | | | |
| | | | | | | | | | KNEDMAT | | | | | |
| | | | | | | | | | YFC | | | | | |
| ITI_ | QIQLVQS | 270 | GYIFTNY | 349 | INWVKQA | 453 | INTYTRE | 542 | TYADDFK | 688 | ARSLYYV | 824 | WGQGTLV | 852 |
| 12 | GPEVKKH | | G | | PGKGLKW | | P | | GRFAFSL | | NNYEAY | | TVSA | |
| 7H | GETVKIS | | | | MGW | | | | ETSASSA | | | | | |
| | CKAS | | | | | | | | YLQISNL | | | | | |
| | | | | | | | | | TTEDMAT | | | | | |
| | | | | | | | | | YFC | | | | | |
| ITI_ | QIQLVQS | 271 | GYIFTDY | 365 | INWVKQA | 453 | INTYTGK | 543 | TYADDFK | 689 | ARSLYYG | 825 | WGQGTLV | 869 |
| 12 | GPELKKH | | G | | PGKGLKW | | P | | GRFAFSL | | NNYEAC | | TVS- | |
| 8H | GETVRIS | | | | MGW | | | | ETSASTA | | | | | |
| | CKAS | | | | | | | | YLQINNL | | | | | |
| | | | | | | | | | KTEDMAT | | | | | |
| | | | | | | | | | YFC | | | | | |
| | | Seq. | | Seq. | | Seq. | | Seq. | | Seq. | | Seq. | | Seq. |
| | FR1 | ID | CDR1 | ID | FR2 | ID | CDR2 | ID | FR3 | ID | CDR3 | ID | FR4 ID | ID |

Consensus Cluster #7

| | | | | | | | | | [K/D]YN | | | | | |
|---|---|---|---|---|---|---|---|---|---|---|---|---|---|---|
| | | | | | | | | | [E/A][K | | | | | |
| | QVQL[Q/ | | | | | | | | /A]F[K] | | | | | |
| | K]QSG[A | | | | | | | | [L/I][T | | | | | |
| | /P][E/G | | | | | | | | /S][A/K | | | | | |
| | ]LV[R/Q | | | | | | | | ]D[T/N] | | | | | |
| | ]P[G/S] | | | | | | | | S[S/K]S | | | | | |
| | [T/Q][S | | | | [I/V][G | | | | [T/Q][A | | | | | |
| | [N][V/L | | | | /H]W[V/ | | | | /V][Y/F | | | | | |
| | ][K/S][ | | G[Y/F][ | | I][K/R] | | | | ] | | | | | |
| | M/I] | | T/S][F/ | | Q[R/S]P | | I[Y/W][ | | SL[T/Q] | | | | WGQGT[T | |
| | [S/T]C[ | | L]T[N/S | | G[H/K]G | | P/S]G[G | | [S/A][E | | AS[G/L] | | /L][L/V | |
| | K/T][A/ | | ][S/Y][ | | LEW[I/L | | /-][A/G | | /D]D[S/ | | [R/-][D | | ]TVS[S/ | |
| | V][A/S] | 272 | W/G] | 366 | ]G[D/V] | 454 | ][Y/G]T | 544 | T]AIYYC | 690 | /Y]Y | 826 | A] | 858 |
| H5S15- | QVQLQQS | 226 | GYTFTNS | 289 | IGWVKQR | 397 | IYPGGAY | 545 | KYNEKFK | 691 | ASGRDY | 827 | WGQGTTL | 856 |
| 6AH | GAELVRP | | W | | PGHGLEW | | T | | GKATLTA | | | | TVSS | |
| | GTSVKMS | | | | IGD | | | | DTSSSTA | | | | | |
| | CKAA | | | | | | | | YMQLSSL | | | | | |
| | | | | | | | | | TSEDSAI | | | | | |
| | | | | | | | | | YYC | | | | | |
| ITI_ | QVQLKQS | 273 | GFSLTSY | 306 | VHWIRQS | 455 | IWSG-GG | 546 | DYNAAFI | 692 | ASL-YY | 828 | WGQGTLV | 852 |
| 04 | GPGLVQP | | G | | PGKGLEW | | T | | SRLSISK | | | | TVSA | |
| 5H | SQNLSIT | | | | LGV | | | | DNSKSQV | | | | | |
| | CTVS | | | | | | | | FFKMNSL | | | | | |
| | | | | | | | | | QADDTAI | | | | | |
| | | | | | | | | | YYC | | | | | |
| ITI_ | QVQLKQS | 273 | GFSLTSY | 306 | VHWIRQS | 455 | IWSG-GG | 546 | DYNAAFI | 693 | ASL-YY | 828 | WGQGTLV | 852 |
| 04 | GPGLVQP | | G | | PGKGLEW | | T | | SRLTISK | | | | TVSA | |
| 6H | SQNLSIT | | | | LGV | | | | DNSKSQV | | | | | |
| | CTVS | | | | | | | | FFKMNSL | | | | | |
| | | | | | | | | | QADDTAI | | | | | |
| | | | | | | | | | YYC | | | | | |
| | | Seq. | | Seq. | | Seq. | | Seq. | | Seq. | | Seq. | | Seq. |
| | FR1 | ID | CDR1 | ID | FR2 | ID | CDR2 | ID | FR3 | ID | CDR3 | ID | FR4 ID | ID |

Consensus Cluster #13

| | | | | | | | | | [I/K/Y] | | | | | |
|---|---|---|---|---|---|---|---|---|---|---|---|---|---|---|
| | | | | | | | | | Y[D/K][ | | | | | |
| | | | | | | | | | P/E]KF[ | | | | | |
| | | | | | | | | | Q/K][G/ | | | | | |
| | | | | | | | | | D]KA[S/ | | | | | |
| | [E/Q]VQ | | | | | | | | T/I][I/ | | | | | |
| | LQQSG[A | | | | | | | | L]TAD[T | | | | | |
| | /G]EL[V | | | | | | | | /K]SS[N | | | | | |
| | /L][R/K | | G[F/Y][ | | | | | | /S]TAY[ | | AR[G/V] | | | |
| | ]PG[A/T | | N/A][I/ | | [M/I][H | | I[D/N]P | | L/M]QLS | | [Y/D][S | | | |
| | ][L/S]V | | F][K/T] | | /E]WVKQ | | [E/A/G] | | SLTS[E/ | | /Y/-][S | | | |
| | K[L/V]S | | [D/N][D | | RP[E/G] | | [N/S][G | | D]D[T/S | | /A][S/M | | WGQGT[L | |
| | C[K/T]A | | /T/Y][Y | | QGLEWIG | | /D][N/G | | ]AVY[Y/ | | ][P/D][ | | /S]VTVS | |
| | S | 274 | /L] | 367 | [W/R/V] | 456 | ][T/I] | 547 | F]C | 694 | Y/F1 | 829 | [A/S] | 870 |
| H5S15- | EVQLQQS | 275 | GFNIKDD | 368 | MHWVKQR | 443 | IDPENGN | 548 | IYDPKFQ | 695 | ARGYSSS | 830 | WGQGTLV | 852 |
| 29AH | GAELVRP | | Y | | PEQGLEW | | T | | GKASITA | | PY | | TVSA | |
| | GALVKLS | | | | IGW | | | | DTSSNTA | | | | | |
| | CKAS | | | | | | | | YLQLSSL | | | | | |
| | | | | | | | | | TSEDTAV | | | | | |
| | | | | | | | | | YYC | | | | | |
| H5S15- | EVQLQQS | 229 | GFNIKDT | 322 | MHWVKQR | 400 | IDPANDN | 502 | KYDPKFQ | 617 | ARVYYAM | 831 | WGQGTSV | 848 |
| 2AH | GAELVKP | | Y | | PEQGLEW | | T | | GKATITA | | DY | | TVSS | |
| | GASVKLS | | | | IGR | | | | DTSSNTA | | | | | |
| | CTAS | | | | | | | | YLQLSSL | | | | | |
| | | | | | | | | | TSEDTAV | | | | | |
| | | | | | | | | | YYC | | | | | |
| H5S19- | QVQLQQS | 276 | GYAFTNY | 327 | IEWVKQR | 413 | INPGSGG | 549 | YYKEKFK | 696 | ARGD-AM | 832 | WGQGTSV | 848 |
| 24AH | GGELLRP | | L | | PGQGLEW | | I | | DKAILTA | | DF | | TVSS | |
| | GTSVKVS | | | | IGV | | | | DKSSSTA | | | | | |
| | CKAS | | | | | | | | YMQLSSL | | | | | |
| | | | | | | | | | TSDDSAV | | | | | |
| | | | | | | | | | YFC | | | | | |
| | | Seq. | | Seq. | | Seq. | | Seq. | | Seq. | | Seq. | | Seq. |
| | FR1 | ID | CDR1 | ID | FR2 | ID | CDR2 | ID | FR3 | ID | CDR3 | ID | FR4 ID | ID |

Consensus Cluster #18

| | | | | | | | | | | | TR[H/G] | | | |
|---|---|---|---|---|---|---|---|---|---|---|---|---|---|---|
| | | | | | | | | | YYPDSVK | | [E/D/G] | | | |
| | [E/D]V[ | | | | | | | | GRFTISR | | [L/D][G | | | |
| | Q/K]LVE | | | | | | | | DNAKNTL | | /-][N/- | | | |
| | SGG[D/G | | | | | | | | YLQM[N/ | | ][R/-][ | | WGQGT[L | |
| | ]LVKPGG | | [G/V]FT | | MSWVRQT | | | | S]SLKSE | | S/Y/G][ | | /T/A][V | |
| | SLKLSCA | | FS[S/R] | | P[D/E]K | | ISSGGS[ | | DTA[M/I | | R/G/L]F | | /L]TVS[ | |
| | AS | 277 | Y[G/T] | 369 | RLEWVAT | 457 | S/Y]T | 550 | ]YYC | 697 | [P/D]Y | 833 | A/S] | 871 |
| H5S14- | DVKLVES | 278 | VFTFSRY | 370 | MSWVRQT | 446 | ISSGGSY | 551 | YYPDSVK | 698 | TRGGD-- | 834 | WGQGTAL | 872 |
| 1AH | GGGLVKP | | T | | PEKRLEW | | T | | GRFTISR | | -GLFDY | | TVSS | |
| | GGSLKLS | | | | VAT | | | | DNAKNTL | | | | | |
| | CAAS | | | | | | | | YLQMSSL | | | | | |
| | | | | | | | | | KSEDTAI | | | | | |
| | | | | | | | | | YYC | | | | | |
| H5S19- | DVKLVES | 278 | GFTFSSY | 346 | MSWVRQT | 446 | ISSGGSY | 551 | YYPDSVK | 655 | TRGDD-- | 835 | WGQGTTL | 856 |
| 5AH | GGGLVKP | | T | | PEKRLEW | | T | | GRFTISR | | -YGFDY | | TVSS | |
| | GGSLKLS | | | | VAT | | | | DNAKNTL | | | | | |
| | CAAS | | | | | | | | YLQMSSL | | | | | |
| | | | | | | | | | KSEDTAM | | | | | |
| | | | | | | | | | YYC | | | | | |
| ITI_ | EVQLVES | 251 | GFTFSSY | 343 | MSWVRQT | 430 | ISSGGSS | 552 | YYPDSVK | 699 | TRHELGN | 836 | WGQGTLV | 852 |
| 20 | GGDLVKP | | G | | PDKRLEW | | T | | GRFTISR | | RSRFPY | | TVSA | |
| 3H | GGSLKLS | | | | VAT | | | | DNAKNTL | | | | | |
| | CAAS | | | | | | | | YLQMNSL | | | | | |
| | | | | | | | | | KSEDTAM | | | | | |
| | | | | | | | | | YYC | | | | | |
| | | Seq. | | Seq. | | Seq. | | Seq. | | Seq. | | Seq. | | Seq. |
| | FR1 | ID | CDR1 | ID | FR2 | ID | CDR2 | ID | FR3 | ID | CDR3 | ID | FR4 ID | ID |

Consensus Cluster #22

| | | | | | | | | | [N/S/Y] | | | | | |
|---|---|---|---|---|---|---|---|---|---|---|---|---|---|---|
| | | | | | | | | | Y[D/N/S | | | | | |
| | | | | | | | | | ][E/P/D | | | | | |
| | | | | | | | | | ][K/S][ | | | | | |
| | | | | | | | | | F/L/V]K | | | | | |
| | | | | | | | | | [S/G][K | | | | | |
| | | | | | | | | | /R][A/I | | | | | |
| | | | | | | | | | /F][T/S | | | | | |
| | | | | | | | | | ][L/I][ | | | | | |
| | [Q/D/E] | | | | | | | | T/S][V/ | | | | | |
| | V[Q/K]L | | | | | | | | R]D[T/D | | | | | |
| | [Q/D][Q | | | | | | | | ]S[S/K] | | | | | |
| | /E][P/S | | | | | | | | [S/N][T | | | | | |
| | /T]G[S/ | | | | | | | | /Q/S][A | | | | | |
| | P/G][E/ | | | | | | | | /F/V][Y | | | | | |
| | G]LV[R/ | | | | [M/W][H | | | | /F][M/L | | | | | |
| | K/Q]P[G | | | | /N]W[V/ | | | | ]Q[L/M] | | | | | |
| | /S][A/Q | | | | I][K/R] | | I[Y/V/R | | [S/N][S | | | | | |
| | /R][S/P | | | | Q[R/F/S | | ][P/Y/N | | /N][L/V | | | | | |
| | ][V/L/M | | G[Y/F][ | | ]P[G/E] | | ][G/S/K | | ][T/R][ | | | | | |
| | ][K/S]L | | T/S][F/ | | [Q/N/K] | | ][-/P][ | | S/A]ED[ | | T[I/R/W | | | |
| | [S/T][K | | I][-/T] | | [G/K]LE | | -/Y][S/ | | S/T/M][ | | ][Y/G][ | | WGQGT[L | |
| | /T/V][A | | [T/S][S | | W[I/M/V | | -/N][G/ | | A/G][V/ | | D/-][G/ | | /S/T][V | |
| | /V][S/T | | /D][Y/F | | ][G/A][ | | Y][S/E] | | T/I]Y[Y | | M/-][Y/ | | /L]TVS[ | |
| | ] | 279 | ][W/A] | 371 | N/Y/Q] | 458 | T | 553 | /F]C | 700 | D/N]Y | 837 | A/S] | 873 |
| H5S14- | QVQLQQP | 280 | GYTF-TS | 316 | MHWVKQR | 459 | IYPG--S | 554 | NYDEKFK | 701 | TIYDGYY | 838 | WGQGTLV | 852 |
| 21AH | GSELVRP | | YW | | PGQGLEW | | GST | | SKATLTV | | | | TVSA | |
| | GASVKLS | | | | IGN | | | | DTSSSTA | | | | | |
| | CKAS | | | | | | | | YMQLSSL | | | | | |
| | | | | | | | | | TSEDSAV | | | | | |
| | | | | | | | | | YYC | | | | | |
| H5S14- | EVKLDET | 281 | GFTF-SD | 372 | MNWVRQS | 460 | IRNKPYN | 555 | YYSDSVK | 702 | TWG--NY | 839 | WGQGTTL | 856 |
| 27AH | GGGLVQP | | YW | | PEKGLEW | | YET | | GRFTISR | | | | TVSS | |
| | GRPMKLS | | | | VAQ | | | | DDSKSSV | | | | | |
| | CVAS | | | | | | | | YLQMNNL | | | | | |
| | | | | | | | | | RAEDMGI | | | | | |
| | | | | | | | | | YYC | | | | | |
| H5S14- | DVQLQES | 235 | GYSITSD | 373 | WNWIRQF | 403 | IVYS--- | 556 | SYNPSLK | 703 | TRG-MDY | 840 | WGQGTSV | 848 |
| 5AH | GPGLVKP | | FA | | PGNKLEW | | -GST | | SRISITR | | | | TVSS | |
| | SQSLSLT | | | | MGY | | | | DTSKNQF | | | | | |
| | CTVT | | | | | | | | FLQLNSV | | | | | |
| | | | | | | | | | TAEDTAT | | | | | |
| | | | | | | | | | YFC | | | | | |
| | | Seq. | | Seq. | | Seq. | | Seq. | | Seq. | | Seq. | | Seq. |
| | FR1 | ID | CDR1 | ID | FR2 | ID | CDR2 | ID | FR3 | ID | CDR3 | ID | FR4 ID | ID |

Consensus Cluster #16

| | | | | | | | | | [S/K]Y[ | 704 | | | | |
|---|---|---|---|---|---|---|---|---|---|---|---|---|---|---|
| | | | | | | | | | S/D]P[S | | | | | |
| | | | | | | | | | /K][L/F | | | | | |
| | | | | | | | | | ][K/Q][ | | | | | |
| | | | | | | | | | S/D][R/ | | | | | |
| | | | | | | | | | K][I/A] | | | | | |
| | [D/E]VQ | | | | | | | | [S/T]IT | | | | | |
| | LQ[E/Q] | | | | | | | | [R/T]D[ | | | | | |
| | SG[P/A] | | | | [W/I][N | | | | T/A]S[K | | | | | |
| | [G/E]L[ | | | | /H]W[I/ | | | | /S]N[Q/ | | | | | |
| | V/M][K/ | | | | V][R/K] | | | | T][F/A] | | [V/T][Y | | | |
| | S]P[S/G | | | | Q[F/R]P | | | | [F/Y]LQ | | /K][F/S | | | |
| | ][Q/A]S | | G[Y/F][ | | [G/E][N | | | | L[N/S]S | | ][K/L][ | | | |
| | [L/V][S | | S/N]I[T | | /Q][K/G | | [A/D][Y | | [V/L]T[ | | Y/L][G/ | | | |
| | /N]L[T/ | | /-][S/K | | ]LEW[M/ | | /P][S/A | | T/S]EDT | | W][-/S] | | | |
| | S]CT[V/ | | ]D[Y/T] | | I]G[Y/K | | ][-/N]G | | A[T/V]Y | | [-/L]G[ | | WGQGTLV | |
| | A][T/S] | 282 | [A/Y] | 374 | ] | 461 | [G/N]T | 557 | YC | | A/G]FAY | 841 | TVSA | 852 |
| H5S19- | DVQLQES | 235 | GYSITSD | 318 | WNWIRQF | 403 | IAYS-GG | 558 | SYSPSLK | 705 | VYFKYG- | 842 | WGQGTLV | 852 |
| 1AH | GPGLVKP | | YA | | PGNKLEW | | T | | SRISITR | | -GAFAY | | TVSA | |
| | SQSLSLT | | | | MGY | | | | DTSKNQF | | | | | |
| | CTVT | | | | | | | | FLQLNSV | | | | | |
| | | | | | | | | | TTEDTAT | | | | | |
| | | | | | | | | | YYC | | | | | |
| ITI_ | EVQLQQS | 283 | GFNI-KD | 315 | IHWVKQR | 462 | IDPANGN | 499 | KYDPKFQ | 706 | TKSLLWS | 843 | WGQGTLV | 852 |
| 02 | GAELMSP | | TY | | PEQGLEW | | T | | DKATITT | | LGGFAY | | TVSA | |
| 3H | GASVNLS | | | | IGK | | | | DASSNTA | | | | | |
| | CTAS | | | | | | | | YLQLSSL | | | | | |
| | | | | | | | | | TSEDTAV | | | | | |
| | | | | | | | | | YYC | | | | | |
| | | Seq. | | Seq. | | Seq. | | Seq. | | Seq. | | Seq. | | Seq. |
| | FR1 | ID | CDR1 | ID | FR2 | ID | CDR2 | ID | FR3 | ID | CDR3 | ID | FR4 ID | ID |

Consensus Cluster #1

| | | | | | | | | | TYADDFK | | | | | |
|---|---|---|---|---|---|---|---|---|---|---|---|---|---|---|
| | | | | | | | | | GRFAFSL | | | | | |
| | QIQLVQS | | | | | | | | ETSASTA | | | | | |
| | GPELKKP | | | | VNWVKQA | | | | YLQINNL | | | | | |
| | GETVKIS | | GYTFTNY | | PGKDLKW | | INTYTGE | | KNEDMAT | | | | WGQGTLV | |
| | CKAS | 247 | G | 338 | MGW | 425 | P | 513 | YFC | 645 | TSRSWVL | 844 | TVSA | 852 |
| H5S14- | QIQLVQS | 247 | GYTFTNY | 338 | VNWVKQA | 425 | INTYTGE | 513 | TYADDFK | 645 | TSRSWVL | 844 | WGQGTLV | 852 |
| 3AH | GPELKKP | | G | | PGKDLKW | | P | | GRFAFSL | | | | TVSA | |
| | GETVKIS | | | | MGW | | | | ETSASTA | | | | | |
| | CKAS | | | | | | | | YLQINNL | | | | | |
| | | | | | | | | | KNEDMAT | | | | | |
| | | | | | | | | | YFC | | | | | |
| | | Seq. | | Seq. | | Seq. | | Seq. | | Seq. | | Seq. | | Seq. |
| | FR1 | ID | CDR1 | ID | FR2 | ID | CDR2 | ID | FR3 | ID | CDR3 | ID | FR4 ID | ID |

Consensus Cluster #2

| | | | | | | | | | VFNQKFK | | | | | |
|---|---|---|---|---|---|---|---|---|---|---|---|---|---|---|
| | | | | | | | | | GKAKLTA | | | | | |
| | EVQLQQS | | | | | | | | VTSATTA | | | | | |
| | GTVLARP | | | | MHWLKQR | | | | YMELSSL | | | | | |
| | GASVKMS | | GYSFTSY | | PGQGLEW | | IYPGNSD | | TNEDSAV | | TKEPRTI | | WGQGTLV | |
| | CKAS | 284 | W | 375 | IGA | 463 | T | 559 | YYC | 707 | EGAWFTY | 845 | TVSA | 852 |
| H5S20- | EVQLQQS | 284 | GYSFTSY | 375 | MHWLKQR | 463 | IYPGNSD | 559 | VFNQKFK | 707 | TKEPRTI | 845 | WGQGTLV | 852 |
| 27AH | GTVLARP | | W | | PGQGLEW | | T | | GKAKLTA | | EGAWFTY | | TVSA | |
| | GASVKMS | | | | IGA | | | | VTSATTA | | | | | |
| | CKAS | | | | | | | | YMELSSL | | | | | |
| | | | | | | | | | TNEDSAV | | | | | |
| | | | | | | | | | YYC | | | | | |
| | | Seq. | | Seq. | | Seq. | | Seq. | | Seq. | | Seq. | | Seq. |
| | FR1 | ID | CDR1 | ID | FR2 | ID | CDR2 | ID | FR3 | ID | CDR3 | ID | FR4 ID | ID |
| | | | | | | | | | TYNQKFT | 708 | | | | |
| | | | | | | | | | GKAKLTA | | | | | |
| | EVQLQQS | | | | | | | | VTSTSTA | | | | | |
| Consensus | GTVLARP | | | | MHWVKQR | | | | YMELSSL | | | | | |
| Cluster | GASVKMS | | GYTFTSF | | PGQGLEW | | ISPGNSE | | TNEDSAV | | TKIYYDY | | WGQGTTL | |
| #3 | CKAS | 284 | W | 376 | IGA | 442 | T | 560 | YYC | | DDGY | 846 | TVSS | 856 |
| H5S15- | EVQLQQS | 284 | GYTFTSF | 376 | MHWVKQR | 442 | ISPGNSE | 560 | TYNQKFT | 708 | TKIYYDY | 846 | WGQGTTL | 856 |
| 23AH | GTVLARP | | W | | PGQGLEW | | T | | GKAKLTA | | DDGY | | TVSS | |
| | GASVKMS | | | | IGA | | | | VTSTSTA | | | | | |
| | CKAS | | | | | | | | YMELSSL | | | | | |
| | | | | | | | | | TNEDSAV | | | | | |
| | | | | | | | | | YYC | | | | | |
| | | Seq. | | Seq. | | Seq. | | Seq. | | Seq. | | Seq. | | Seq. |
| | FR1 | ID | CDR1 | ID | FR2 | ID | | ID | FR3 | ID | CDR3 | ID | FR4 ID | ID |

Consensus Cluster #6

| | | | | | | | | | [N/Q/T/ | | | | | |
|---|---|---|---|---|---|---|---|---|---|---|---|---|---|---|
| | | | | | | | | | Y/R/S/K | | | | | |
| | | | | | | | | | ][L/S/R | | | | | |
| | | | | | | | | | ]E/D/I/ | | | | | |
| | | | | | | | | | Y/T/A/Q | | | | | |
| | | | | | | | | | /H][S/T | | | | | |
| | | | | | | | | | /P/D]G[ | | | | | |
| | | | | | | | | | I/V/A]P | | | | | |
| | [D/N/S/ | | | | | | | | [A/S/D/ | | | | | |
| | E/Q][I/ | | | | | | | | V/P/I]R | | | | | |
| | N/V][V/ | | | | | | | | F[S/R/T | | | | | |
| | Q][L/M/ | | | | | | | | ]GSG[S/ | | | | | |
| | I]TQ[S/ | | | | | | | | Y][G/R] | | | | | |
| | T][P/Q/ | | | | | | | | [T/S/N/ | | | | | |
| | T/S][A/ | | | | | | | | K][D/S/ | | | | | |
| | S/K/T][ | | [Q/E/R/ | | | | | | K][F/Y] | | | | | |
| | S/T/F/I | | S/K/D][ | | | | | | [T/S][L | | | | | |
| | /Y/L][L | | S/T/N/D | | | | | | /F][N/T | | | | | |
| | /M/Q][A | | /G/H][V | | | | | | /S/K][I | | | | | |
| | /S/T/L] | | /I/L][D | | | | | | /F][H/D | | Q[Q/H/N | | | |
| | [V/A/T] | | /-/L/S/ | | | | | | /S/N/G/ | | /S][S/N | | | |
| | [S/T/P] | | N/R][Y/ | | | | | | T][P/S/ | | /C/G/D/ | | | |
| | [L/P/A/ | | S/-/N][ | | | | | | T/N/R][ | | F/H/W/Y | | | |
| | V]G[Q/D | | -/S][-/ | | | | | | V/M/L][ | | /L][N/Y | | | |
| | /E/G][R | | E][D/Y/ | | | | | | E/Q/D] | | /H/T/F/ | | | |
| | /K/T/S] | | - | | | | | | [E/A/P/ | | S/W][E/ | | | |
| | [A/V/I] | | /N][G/- | | | | | | G/S/Q/T | | A/S/T/K | | | |
| | [T/S] | | /Q][D/N | | | | | | ][E/D]D | | /G][D/F | | | |
| | [I/ | | /E/S/K/ | | | | | | [A/V/L/ | | /Y/S/L/ | | FG[G/A/ | |
| | L/M/V][ | | -/G/T/R | | | | [A/L/Y/ | | F/I][A/ | | I/T/N][ | | S]G[T/A | |
| | S/T/N]C | | ][S/D/N | | | | W/S/G/R | | G/V][T/ | | P/T] | | ][K/NIL | |
| | [K/R/S/ | | /K/R/T] | | | | /D][A/E | | S/M/V/E | | [W/L | | [E/A][I | |
| | T/L][A/ | | [Y/F/L/ | | | | /T/G][S | | /D]Y[Y/ | | /F/Y/P/ | | /L][K/- | |
| | S/T/V]S | 1033 | D/N/W] | 1099 | CDR2 | 1163 | /T] | 1230 | F/H]C | 1262 | R]T | 1343 | /R] | 1426 |
| H5S14- | SIVMTQT | 1034 | QSV---- | 1100 | VAWYQQK | 1164 | YES | 1231 | NRYTGVP | 1263 | QQDYSSP | 1344 | FGGGTKL | 1427 |
| 15AL | PKFLLVS | | ----SND | | PGQSPKL | | | | DRFTGSG | | WT | | EIK | |
| | AGDRVTI | | | | LIY | | | | YGTDFTF | | | | | |
| | TCKAS | | | | | | | | TISTVQA | | | | | |
| | | | | | | | | | EDLAVYF | | | | | |
| | | | | | | | | | C | | | | | |
| H5S14- | SIVMTQT | 1034 | QSV---- | 1100 | VAWYQQK | 1164 | YAS | 1232 | NRYTGVP | 1263 | QQDYSSP | 1344 | FGGGTKL | 1427 |
| 16AL | PKFLLVS | | ----SND | | PGQSPKL | | | | DRFTGSG | | WT | | EIK | |
| | AGDRVTI | | | | LIY | | | | YGTDFTF | | | | | |
| | TCKAS | | | | | | | | TISTVQA | | | | | |
| | | | | | | | | | EDLAVYF | | | | | |
| | | | | | | | | | C | | | | | |
| H5S14- | QIVLTQS | 1035 | SSV---- | 1101 | MHWYQQK | 1165 | DTS | 1233 | KLASGVP | 1264 | QQWSSNP | 1345 | FGSGTKL | 1428 |
| 18AL | PAIMSAS | | -----SY | | SGTSPKR | | | | ARFSGSG | | FT | | EIK | |
| | PGEKVTM | | | | WIY | | | | SGTSYSL | | | | | |
| | TCSAS | | | | | | | | TISSMEA | | | | | |
| | | | | | | | | | EDAATYY | | | | | |
| | | | | | | | | | C | | | | | |
| H5S14- | DVQITQS | 1036 | KSI---- | 1102 | LAWYQEK | 1166 | SGS | 1234 | TLQSGIP | 1265 | QQHNEYP | 1346 | FGGGTKL | 1427 |
| 1AL | PSYLAAS | | ----SKY | | PGKTNQL | | | | SRFSGSG | | WT | | EIK | |
| | PGETITI | | | | LIY | | | | SGTDFTL | | | | | |
| | _ | | | | | | | | TISSLEP | | | | | |
| | NCRAS | | | | | | | | EDFAMYY | | | | | |
| | | | | | | | | | C | | | | | |
| H5S14- | NIVLTQS | 1037 | ESVDS-- | 1103 | MHWYQQK | 1167 | LAS | 1235 | NLESGVP | 1266 | QQNNEDP | 1347 | FGGGTKL | 1427 |
| 20AL | PASLAVS | | --YGNSF | | PGQPPKL | | | | ARFSGSG | | YT | | EIK | |
| | LGQRATI | | | | LIY | | | | SRTDFTL | | | | | |
| | SCRAS | | | | | | | | TIDPVEA | | | | | |
| | | | | | | | | | DDAATYY | | | | | |
| | | | | | | | | | C | | | | | |
| H5S14- | SIVMTQT | 1034 | QSV---- | 1100 | VAWYQQK | 1164 | YAS | 1232 | NRYTGVP | 1263 | QQDYSSP | 1348 | FGAGTKL | 1429 |
| 24AL | PKFLLVS | | ----SND | | PGQSPKL | | | | DRFTGSG | | LT | | ELK | |
| | AGDRVTI | | | | LIY | | | | YGTDFTF | | | | | |
| | TCKAS | | | | | | | | TISTVQA | | | | | |
| | | | | | | | | | EDLAVYF | | | | | |
| | | | | | | | | | C | | | | | |
| H5S14- | DIQMTQS | 1038 | DHI---- | 1104 | LAWYQQK | 1168 | GAT | 1236 | SLETGVP | 1267 | QQYWSTP | 1349 | FGGGTKL | 1427 |
| 25AL | SSYLSVS | | ----NNW | | PGNAPRL | | | | PRFSGSG | | YT | | EIK | |
| | LGGRVTI | | | | LIS | | | | SGKDYTL | | | | | |
| | TCKAS | | | | | | | | SITSLQT | | | | | |
| | | | | | | | | | EDVATYY | | | | | |
| | | | | | | | | | C | | | | | |
| H5S14- | QIVLTQS | 1039 | SSV---- | 1101 | MYWYQQK | 1169 | RTS | 1237 | NLASGVP | 1268 | QQYHSYP | 1350 | FGAGTKL | 1429 |
| 4AL | PAIMSAS | | -----SY | | PGSSPKP | | | | ARFSGSG | | LT | | ELK | |
| | PGEKVTI | | | | WIY | | | | SGTSYSL | | | | | |
| | SCSAS | | | | | | | | TISSMEA | | | | | |
| | | | | | | | | | EDAATYY | | | | | |
| | | | | | | | | | C | | | | | |
| H5S14- | QIVLTQS | 1039 | SSV---- | 1101 | MYWYQQK | 1169 | RTS | 1237 | NLASGVP | 1269 | QQYHSYP | 1350 | FGAGTKL | 1429 |
| 4BL | PAIMSAS | | -----SY | | PGSSPKP | | | | ARFSGSG | | LT | | ELK | |
| | PGEKVTI | | | | WIY | | | | SGSSYSL | | | | | |
| | SCSAS | | | | | | | | TISSMEA | | | | | |
| | | | | | | | | | EDAATYY | | | | | |
| | | | | | | | | | C | | | | | |
| H5S14- | DIQMTQS | 1040 | QTI---- | 1105 | LAWYQQK | 1170 | AAT | 1238 | SLADGVP | 1270 | QQLHSTP | 1351 | FGGGTKL | 1427 |
| 6AL | PASQSAS | | ----GTW | | PGKSPQL | | | | SRFSGSG | | YT | | EIK | |
| | LGESVTI | | | | LIY | | | | SGTKFSF | | | | | |
| | TCLAS | | | | | | | | KISSLQA | | | | | |
| | | | | | | | | | EDFVSYY | | | | | |
| | | | | | | | | | C | | | | | |
| H5S15- | DIVLTQS | 1041 | QSVDY-- | 1106 | MNWYQQK | 1171 | AAS | 1239 | NLDSGIP | 1271 | QQSNEDP | 1352 | FGAGTKL | 1429 |
| 13AL | PASLAVS | | --DGESY | | PGQPPKL | | | | ARFSGSG | | LT | | ELK | |
| | LGQRATI | | | | LIY | | | | SGTDFTL | | | | | |
| | SCKAS | | | | | | | | NIHPVEE | | | | | |
| | | | | | | | | | EDAATYY | | | | | |
| | | | | | | | | | C | | | | | |
| H5S15- | DIVMTQS | 1042 | QNV---- | 1107 | VAWYQQK | 1172 | SAS | 1240 | YRYSGVP | 1272 | QQYNSYP | 1353 | FGGGTNL | 1430 |
| 14AL | QKFMSTS | | ----GTN | | PGQSPKA | | | | DRFTGSG | | YT | | EIK | |
| | VGDRVSV | | | | LIY | | | | SGTDFTL | | | | | |
| | TCKAS | | | | | | | | TISNVQS | | | | | |
| | | | | | | | | | EDLAEYF | | | | | |
| | | | | | | | | | C | | | | | |
| H5S15- | DIVMTQS | 1042 | QNV---- | 1107 | VAWYQQR | 1173 | SAS | 1240 | YRYSGVP | 1273 | QQYNSYP | 1353 | FGGGAKL | 1431 |
| 14BL | QKFMSTS | | --GTN | | PGQSPKS | | | | DRFTGSG | | YT | | EIK | |
| | VGDRVSV | | | | LIY | | | | SGTDFTL | | | | | |
| | TCKAS | | | | | | | | TISNVQS | | | | | |
| | | | | | | | | | EDLADYF | | | | | |
| | | | | | | | | | C | | | | | |
| H5S15- | DIVMTQS | 1042 | QNV---- | 1107 | VAWYQQK | 1172 | SAS | 1240 | YRYSGVP | 1272 | QQYNSYP | 1353 | FGGGTKL | 1432 |
| 14CL | QKFMSTS | | --GTN | | PGQSPKA | | | | DRFTGSG | | YT | | EI- | |
| | VGDRVSV | | | | LIY | | | | SGTDFTL | | | | | |
| | TCKAS | | | | | | | | TISNVQS | | | | | |
| | | | | | | | | | EDLAEYF | | | | | |
| | | | | | | | | | C | | | | | |
| H5S15- | QIVLTQS | 1035 | SSV---- | 1101 | MHWYQQK | 1165 | DTS | 1233 | KLASGVP | 1264 | QQWSSNP | 1354 | FGAGTKL | 1429 |
| 15AL | PAIMSAS | | ---SY | | SGTSPKR | | | | ARFSGSG | | LT | | ELK | |
| | PGEKVTM | | | | WIY | | | | SGTSYSL | | | | | |
| | TCSAS | | | | | | | | TISSMEA | | | | | |
| | | | | | | | | | EDAATYY | | | | | |
| | | | | | | | | | C | | | | | |
| H5S15- | ENVLTQS | 1043 | SSVS--- | 1108 | LHWYQQK | 1174 | STS | 1241 | NLASGVP | 1274 | QQYSGYP | 1355 | FGGGTKL | 1427 |
| 18AL | PAIMSAS | | --SSY | | SGASPKL | | | | ARFSGSG | | LT | | EIK | |
| | PGEKVTM | | | | WIY | | | | SGTSYSL | | | | | |
| | TCRAS | | | | | | | | TISSVEA | | | | | |
| | | | | | | | | | EDAATYY | | | | | |
| | | | | | | | | | C | | | | | |
| H5S15- | DIVLTQS | 1041 | QSVDY-- | 1109 | MNWYQQK | 1175 | AAS | 1239 | NLESGIP | 1275 | QQSNEDP | 1356 | FGSGTKL | 1428 |
| 24AL | PASLAVS | | DGNSY | | PRQPPKL | | | | ARFRGSG | | FT | | EIK | |
| | LGQRATI | | | | LIY | | | | SGTDFTL | | | | | |
| | SCKAS | | | | | | | | NIHPVEE | | | | | |
| | | | | | | | | | EDAATYY | | | | | |
| | | | | | | | | | C | | | | | |
| H5S15- | DIQMTQT | 1044 | QDI---- | 1110 | LNWYQQK | 1176 | YTS | 1242 | RLHSGVP | 1276 | QQGNSLP | 1357 | FGGGTKL | 1427 |
| 28AL | TSSLSVS | | --SNY | | PDGTVKL | | | | SRFSGSG | | WT | | EIK | |
| | LGDRVTI | | | | LIY | | | | SGSDYSL | | | | | |
| | SCRAS | | | | | | | | TISNLEQ | | | | | |
| | | | | | | | | | EDIATYF | | | | | |
| | | | | | | | | | C | | | | | |
| H5S15- | EIVLTQS | 1045 | STIS--- | 1111 | LHWYQQK | 1177 | GTS | 1243 | NLASGVP | 1277 | QQWNSYP | 1358 | FGSGTKL | 1428 |
| 29AL | PALMTAS | | --SRN | | SEASPKP | | | | VRFSGSG | | LT | | EIK | |
| | PGEKVTI | | | | WIY | | | | SGTSYSL | | | | | |
| | TCSVS | | | | | | | | TISSMEA | | | | | |
| | | | | | | | | | EDAATYY | | | | | |
| | | | | | | | | | C | | | | | |
| H5S15- | EIVLTQS | 1046 | SGIR--- | 1112 | LHWYQQK | 1178 | GTS | 1243 | NLASGVP | 1278 | QQWSSYP | 1359 | FGSGTKL | 1428 |
| 4AL | PALMAAS | | --SSN | | SETSPKP | | | | IRFSGSG | | LT | | EIK | |
| | PGEKVTI | | | | WIY | | | | SGTSYSL | | | | | |
| | TCSVS | | | | | | | | TISSMEA | | | | | |
| | | | | | | | | | EDAATYY | | | | | |
| | | | | | | | | | C | | | | | |
| H5S19- | EIVLTQS | 1046 | SSIS--- | 1113 | LHWYQQK | 1178 | GTS | 1243 | NLASGVP | 1277 | QQWSSYP | 1359 | FGAGTKL | 1429 |
| 11AL | PALMAAS | | --SSN | | SETSPKP | | | | VRFSGSG | | LT | | ELK | |
| | PGEKVTI | | | | WIY | | | | SGTSYSL | | | | | |
| | TCSVS | | | | | | | | TISSMEA | | | | | |
| | | | | | | | | | EDAATYY | | | | | |
| | | | | | | | | | C | | | | | |
| H5S19- | DIQMTQT | 1047 | QGI---- | 1114 | LNWYQQK | 1176 | YTS | 1242 | SLHSGVP | 1279 | QQYSKLP | 1360 | FGGGTKL | 1427 |
| 17AL | TSSLSAS | | --SNY | | PDGTVKL | | | | SRFSGSG | | WT | | EIK | |
| | LGDRVTI | | | | LIY | | | | SGTDYSL | | | | | |
| | SCSAS | | | | | | | | TISNLEP | | | | | |
| | | | | | | | | | EDIATYY | | | | | |
| | | | | | | | | | C | | | | | |
| H5S19- | DIQMTQT | 1047 | QGI---- | 1114 | LNWYQQK | 1176 | YTS | 1242 | SLHSGVP | 1280 | QQYSKLP | 1360 | FGGGTKL | 1427 |
| 17BL | TSSLSAS | | --SNY | | PDGTVKL | | | | SRFRGSG | | WT | | EIK | |
| | LGDRVTI | | | | LIY | | | | SGTDYSL | | | | | |
| | SCSAS | | | | | | | | TISNLEP | | | | | |
| | | | | | | | | | EDIATYY | | | | | |
| | | | | | | | | | C | | | | | |
| H5S19- | DIQMTQT | 1047 | QGI---- | 1114 | LNWYQQK | 1176 | YTS | 1242 | SLHSGVP | 1281 | QQYSKLP | 1360 | FGGGTKL | 1427 |
| 17CL | TSSLSAS | | --SNY | | PDGTVKL | | | | SRFSGSG | | WT | | EIK | |
| | LGDRVTI | | | | LIY | | | | SGTDYSL | | | | | |
| | SCSAS | | | | | | | | TISNLEP | | | | | |
| | | | | | | | | | EDIATYF | | | | | |
| | | | | | | | | | C | | | | | |
| H5S19- | DIQMTQT | 1047 | QGI---- | 1114 | LNWYQQK | 1176 | YTS | 1242 | SLHSGVP | 1282 | QQYSKLP | 1360 | FGGGTKL | 1427 |
| 17DL | TSSLSAS | | -SNY | | PDGTVKL | | | | SRFSGSG | | WT | | EIK | |
| | LGDRVTI | | | | LIY | | | | SGTDYSL | | | | | |
| | SCSAS | | | | | | | | SISNLEP | | | | | |
| | | | | | | | | | EDIATYY | | | | | |
| | | | | | | | | | C | | | | | |
| H5S19- | DIQMTQT | 1047 | QGI---- | 1114 | LNWYQQK | 1176 | YTS | 1242 | SLHSGVP | 1283 | QQYSKLP | 1360 | FGGGTKL | 1427 |
| 17EL | TSSLSAS | | --SNY | | PDGTVKL | | | | SRFSGSG | | WT | | EIK | |
| | LGDRVTI | | | | LIY | | | | SGTDYSL | | | | | |
| | SCSAS | | | | | | | | TFSNLEP | | | | | |
| | | | | | | | | | EDIATYY | | | | | |
| | | | | | | | | | C | | | | | |
| H5S19- | DIQMTQT | 1047 | QGI---- | 1114 | LNWYQQK | 1176 | YTS | 1242 | SLHSGVP | 1279 | QQYSKLP | 1360 | FGGGTKL | 1432 |
| 17FL | TSSLSAS | | --SNY | | PDGTVKL | | | | SRFSGSG | | WT | | EI- | |
| | LGDRVTI | | | | LIY | | | | SGTDYSL | | | | | |
| | SCSAS | | | | | | | | TISNLEP | | | | | |
| | | | | | | | | | EDIATYY | | | | | |
| | | | | | | | | | C | | | | | |
| H5S19- | NIVLTQS | 1037 | ESVDS-- | 1115 | MHWYQQK | 1167 | LAS | 1235 | NLESGVP | 1266 | QQNNEDP | 1361 | FGGGTKL | 1432 |
| 1AL | PASLAVS | | YGNSL | | PGQPPKL | | | | ARFSGSG | | PT | | EI- | |
| | LGQRATI | | | | LIY | | | | SRTDFTL | | | | | |
| | SCRAS | | | | | | | | TIDPVEA | | | | | |
| | | | | | | | | | DDAATYY | | | | | |
| | | | | | | | | | C | | | | | |
| H5S19- | DIQMTQT | 1048 | QGI---- | 1114 | LNWYQQK | 1176 | YTS | 1242 | TLHSGVP | 1284 | QQYFKLP | 1362 | FGGGTKL | 1427 |
| 20AL | TSSLSAS | | --SNY | | PDGTVKL | | | | SRFSGSG | | WT | | EIK | |
| | LGDRVTI | | | | LIY | | | | SGTDYSL | | | | | |
| | SCTAS | | | | | | | | TISNLEP | | | | | |
| | | | | | | | | | EDIATYY | | | | | |
| | | | | | | | | | C | | | | | |
| H5S19- | DIQMTQT | 1047 | QGI---- | 1116 | LNWYQQK | 1176 | YTS | 1242 | SLHSGVP | 1279 | QQYSKLP | 1360 | FGGGTKL | 1427 |
| 23AL | TSSLSAS | | --NNY | | PDGTVKL | | | | SRFSGSG | | WT | | EIK | |
| | LGDRVTI | | | | LIY | | | | SGTDYSL | | | | | |
| | SCSAS | | | | | | | | TISNLEP | | | | | |
| | | | | | | | | | EDIATYY | | | | | |
| | | | | | | | | | C | | | | | |
| H5S19- | DIQMTQT | 1048 | QGI---- | 1116 | LNWYQQK | 1176 | YTS | 1242 | TLHSGVP | 1284 | QQYFKLP | 1362 | FGGGTKL | 1427 |
| 26AL | TSSLSAS | | --NNY | | PDGTVKL | | | | SRFSGSG | | WT | | EIK | |
| | LGDRVTI | | | | LIY | | | | SGTDYSL | | | | | |
| | SCTAS | | | | | | | | TISNLEP | | | | | |
| | | | | | | | | | EDIATYY | | | | | |
| | | | | | | | | | C | | | | | |
| H5S19- | DIQMTQT | 1048 | QGI---- | 1114 | LNWYQQK | 1176 | YTS | 1242 | TLHSGVP | 1284 | QQYSKLP | 1360 | FGGGTKL | 1433 |
| 28AL | TSSLSAS | | --SNY | | PDGTVKL | | | | SRFSGSG | | WT | | AIK | |
| | LGDRVTI | | | | LIY | | | | SGTDYSL | | | | | |
| | SCTAS | | | | | | | | TISNLEP | | | | | |
| | | | | | | | | | EDIATYY | | | | | |
| | | | | | | | | | C | | | | | |
| H5S19- | QIVLTQS | 1035 | SSV---- | 1101 | MYWYQQK | 1179 | DTS | 1233 | NLASGVP | 1285 | QQWSSYP | 1363 | FGSGTKL | 1428 |
| 6AL | PAIMSAS | | ---SY | | PGSSPRL | | | | VRFSGSG | | FT | | EIK | |
| | PGEKVTM | | | | LIY | | | | SGTSYSL | | | | | |
| | TCSAS | | | | | | | | TISRMEA | | | | | |
| | | | | | | | | | EDAATYY | | | | | |
| | | | | | | | | | C | | | | | |
| H5S19- | DVQITQS | 1049 | KNI---- | 1117 | LAWYQEK | 1180 | SGS | 1234 | TLQSGIP | 1286 | QQHNEYP | 1346 | FGGGTKL | 1427 |
| 8AL | PSYLAAS | | --SKY | | PGKTNKL | | | | SRFSGSG | | WT | | EIK | |
| | PGETITI | | | | LIY | | | | SGTDFTL | | | | | |
| | _ | | | | | | | | TISSLEP | | | | | |
| | NCRTS | | | | | | | | EDFVMYH | | | | | |
| | | | | | | | | | C | | | | | |
| H5S20- | DIVLTQS | 1041 | QSVDY-- | 1109 | MNWYQQK | 1171 | AAS | 1239 | NLESGIP | 1287 | QQSNEDP | 1364 | FGGGTKL | 1427 |
| 13AL | PASLAVS | | DGNSY | | PGQPPKL | | | | ARFSGSG | | WT | | EIK | |
| | LGQRATI | | | | LIY | | | | SGTDFTL | | | | | |
| | SCKAS | | | | | | | | NIHPVEE | | | | | |
| | | | | | | | | | EDAATYY | | | | | |
| | | | | | | | | | C | | | | | |
| H5S20- | QIVLTQS | 1050 | SSV---- | 1118 | IYWYQQK | 1181 | LTS | 1244 | NLASGVP | 1268 | QQWSSNP | 1354 | FGAGTKL | 1434 |
| 16AL | PALMSAS | | ---SF | | PRSSPKP | | | | ARFSGSG | | LT | | EL- | |
| | PGEKVTM | | | | WIS | | | | SGTSYSL | | | | | |
| | TCSAS | | | | | | | | TISSMEA | | | | | |
| | | | | | | | | | EDAATYY | | | | | |
| | | | | | | | | | C | | | | | |
| H5S20- | QIVLTQS | 1050 | SSV---- | 1118 | IYWYQQK | 1182 | LTS | 1244 | NLASGVP | 1268 | QQWSSNP | 1354 | FGAGTKL | 1434 |
| 16BL | PALMSAS | | ---SF | | PRSSPKP | | | | ARFSGSG | | LT | | EL- | |
| | PGEKVTM | | | | WIY | | | | SGTSYSL | | | | | |
| | TCSAS | | | | | | | | TISSMEA | | | | | |
| | | | | | | | | | EDAATYY | | | | | |
| | | | | | | | | | C | | | | | |
| H5S20- | DIVMTQS | 1051 | RTI---- | 1119 | LHWYQQK | 1183 | YAS | 1232 | QSISGIP | 1288 | QNGHSFP | 1365 | FGAGTKL | 1429 |
| 17AL | PATLSVT | | --SDY | | SHESPRL | | | | SRFSGSG | | LT | | ELK | |
| | PGDRVSL | | | | LIK | | | | SGSDFTL | | | | | |
| | SCRAS | | | | | | | | SISSVEP | | | | | |
| | | | | | | | | | EDVGMYY | | | | | |
| | | | | | | | | | C | | | | | |
| H5S20- | NIVLTQS | 1037 | ESVDS-- | 1103 | MHWYQQK | 1167 | LAS | 1235 | NLESGVP | 1266 | QQNYADP | 1366 | FGGGTKL | 1427 |
| 18AL | PASLAVS | | YGNSF | | PGQPPKL | | | | ARFSGSG | | WT | | EIK | |
| | LGQRATI | | | | LIY | | | | SRTDFTL | | | | | |
| | SCRAS | | | | | | | | TIDPVEA | | | | | |
| | | | | | | | | | DDAATYY | | | | | |
| | | | | | | | | | C | | | | | |
| H5S20- | DIVLTQS | 1041 | QSVDY-- | 1120 | MNWYQQK | 1171 | AAS | 1239 | NLESGIP | 1287 | QQSNEDP | 1364 | FGGGTKL | 1427 |
| 20AL | PASLAVS | | DGDSF | | PGQPPKL | | | | ARFSGSG | | WT | | EIK | |
| | LGQRATI | | | | LIY | | | | SGTDFTL | | | | | |
| | SCKAS | | | | | | | | NIHPVEE | | | | | |
| | | | | | | | | | EDAATYY | | | | | |
| | | | | | | | | | C | | | | | |
| H5S20- | DIVMTQS | 1052 | QSLLNSE | 1121 | LTWYQQK | 1184 | WAS | 1245 | TRESGVP | 1289 | QSDYSYP | 1367 | FGAGTKL | 1429 |
| 23AL | PSSLTVP | | NQKNY | | PGQPPKL | | | | DRFTGSG | | LT | | ELK | |
| | AGEKVTM | | | | LIY | | | | SGTDFTL | | | | | |
| | SCKSS | | | | | | | | TISSVQA | | | | | |
| | | | | | | | | | EDLAVYY | | | | | |
| | | | | | | | | | C | | | | | |
| H5S20- | DIVMTQS | 1042 | QNV---- | 1107 | VAWYQQK | 1172 | SAS | 1240 | YRYSGVP | 1272 | QQYNSYP | 1368 | FGSGTKL | 1428 |
| 32AL | QKFMSTS | | --GTN | | PGQSPKA | | | | DRFTGSG | | FT | | EIK | |
| | VGDRVSV | | | | LIY | | | | SGTDFTL | | | | | |
| | TCKAS | | | | | | | | TISNVQS | | | | | |
| | | | | | | | | | EDLAEYF | | | | | |
| | | | | | | | | | C | | | | | |
| H5S20- | QIVLTQS | 1053 | SSV---- | 1101 | MYWYQQK | 1185 | LTS | 1244 | NLASGVP | 1268 | QQWSSNP | 1354 | FGAGTKL | 1435 |
| 34AL | PALMSAS | | ---SY | | PRSSPKP | | | | ARFSGSG | | LT | | ELR | |
| | PGEKVTM | | | | WIY | | | | SGTSYSL | | | | | |
| | TCTAS | | | | | | | | TISSMEA | | | | | |
| | | | | | | | | | EDAATYY | | | | | |
| | | | | | | | | | C | | | | | |
| H5S20- | DIVMTQS | 1042 | QNV---- | 1107 | VAWYQQK | 1172 | SAS | 1240 | YRYSGVP | 1272 | QQYNSYP | 1369 | FGGGTKL | 1427 |
| 36ALand | QKFMSTS | | --GTN | | PGQSPKA | | | | DRFTGSG | | LT | | EIK | |
| H5S20- | VGDRVSV | | | | LIY | | | | SGTDFTL | | | | | |
| 43AL | TCKAS | | | | | | | | TISNVQS | | | | | |
| | | | | | | | | | EDLAEYF | | | | | |
| | | | | | | | | | C | | | | | |
| H5S20- | DIVMTQS | 1042 | QNV---- | 1107 | VAWYQQK | 1172 | SAS | 1240 | YRYSGVP | 1272 | QQYNSYP | 1369 | FGAGTKL | 1429 |
| 40AL | QKFMSTS | | --GTN | | PGQSPKA | | | | DRFTGSG | | LT | | ELK | |
| | VGDRVSV | | | | LIY | | | | SGTDFTL | | | | | |
| | TCKAS | | | | | | | | TISNVQS | | | | | |
| | | | | | | | | | EDLAEYF | | | | | |
| | | | | | | | | | C | | | | | |
| H5S20- | DIVLTQS | 1041 | QSVDY-- | 1122 | MNWYQQK | 1171 | AAS | 1239 | NLESGIP | 1287 | QQSNEDP | 1364 | FGGGTKL | 1427 |
| 8AL | PASLAVS | | DGDSY | | PGQPPKL | | | | ARFSGSG | | WT | | EIK | |
| | LGQRATI | | | | LIY | | | | SGTDFTL | | | | | |
| | SCKAS | | | | | | | | NIHPVEE | | | | | |
| | | | | | | | | | EDAATYY | | | | | |
| | | | | | | | | | C | | | | | |
| H5S20- | DIVLTQS | 1041 | QSVDY-- | 1122 | MNWFQQK | 1186 | AAS | 1239 | NLESGIP | 1287 | QQSNEDP | 1364 | FGGGTKL | 1427 |
| 8BL | PASLAVS | | DGDSY | | PGQPPKL | | | | ARFSGSG | | WT | | EIK | |
| | LGQRATI | | | | LIY | | | | SGTDFTL | | | | | |
| | SCKAS | | | | | | | | NIHPVEE | | | | | |
| | | | | | | | | | EDAATYY | | | | | |
| | | | | | | | | | C | | | | | |
| ITI_ | NIVLTQS | 1037 | ESVDS-- | 1103 | MHWYQQK | 1167 | LAS | 1235 | NLESGVP | 1266 | QQNNEDP | 1370 | FGGGTKL | 1427 |
| 02 | PASLAVS | | YGNSF | | PGQPPKL | | | | ARFSGSG | | LT | | EIK | |
| 1L | LGQRATI | | | | LIY | | | | SRTDFTL | | | | | |
| | SCRAS | | | | | | | | TIDPVEA | | | | | |
| | | | | | | | | | DDAATYY | | | | | |
| | | | | | | | | | C | | | | | |
| ITI_ | QIVLTQS | 1039 | SSI---- | 1123 | MYWYQQK | 1169 | RTS | 1237 | NLASGVP | 1268 | QQYHSYP | 1350 | FGAGTKL | 1429 |
| 04 | PAIMSAS | | ---SY | | PGSSPKP | | | | ARFSGSG | | LT | | ELK | |
| 0L | PGEKVTI | | | | WIY | | | | SGTSYSL | | | | | |
| | SCSAS | | | | | | | | TISSMEA | | | | | |
| | | | | | | | | | EDAATYY | | | | | |
| | | | | | | | | | C | | | | | |
| ITI_ | EIVLTQS | 1054 | SSIN--- | 1124 | LHWYQQK | 1187 | RTS | 1237 | NLASGVP | 1290 | QQGSTIP | 1371 | FGGGAKL | 1431 |
| 04 | PTTMAAS | | --SNY | | PGFSPKL | | | | PRFSGSG | | YT | | EIK | |
| 5L | PGEKITI | | | | LIY | | | | SGTSYSL | | | | | |
| | _ | | | | | | | | TIGTMEA | | | | | |
| | TCSAS | | | | | | | | EDVATYY | | | | | |
| | | | | | | | | | C | | | | | |
| ITI_ | ENVLTQS | 1055 | SSV---- | 1125 | MYWYQQK | 1188 | YTS | 1242 | NLAPGVP | 1291 | QQFTSST | 1372 | FGGGTKL | 1427 |
| 08 | PAIMSAS | | ---NY | | SDASPKL | | | | ARFSGSG | | WT | | EIK | |
| 2L | LGEKVTM | | | | WIY | | | | SGNSYSL | | | | | |
| | SCRAS | | | | | | | | TISSMEG | | | | | |
| | | | | | | | | | EDAATYY | | | | | |
| | | | | | | | | | C | | | | | |
| ITI_ | ENVLTQS | 1055 | SSV---- | 1125 | MFWYQQK | 1189 | STS | 1241 | NLTPGVP | 1292 | QQFTSST | 1372 | FGGGTKL | 1427 |
| 08 | PAIMSAS | | ---NY | | SDASPKL | | | | ARFSGSG | | WT | | EIK | |
| 3L | LGEKVTM | | | | WIY | | | | SGNSYSL | | | | | |
| | SCRAS | | | | | | | | TISSMEA | | | | | |
| | | | | | | | | | EDAATYY | | | | | |
| | | | | | | | | | C | | | | | |
| ITI_ | EIVLTQS | 1046 | SSIS--- | 1113 | LHWYQQK | 1178 | GTS | 1243 | NLASGVP | 1277 | QQWSSYP | 1359 | FGSGTKL | 1428 |
| 13 | PALMAAS | | --SSN | | SETSPKP | | | | VRFSGSG | | LT | | EIK | |
| 1L | PGEKVTI | | | | WIY | | | | SGTSYSL | | | | | |
| | TCSVS | | | | | | | | TISSMEA | | | | | |
| | | | | | | | | | EDAATYY | | | | | |
| | | | | | | | | | C | | | | | |
| ITI_ | DIQMTQT | 1056 | QDI---- | 1126 | LNWYQQK | 1176 | YTS | 1242 | SLHSGAP | 1293 | QQYSKLP | 1360 | FGGGTKL | 1427 |
| 14 | PSSLSAS | | --NNY | | PDGTVKL | | | | SRFSGSG | | WT | | EIK | |
| 4L | LGDRVTI | | | | LIY | | | | SGTDYSL | | | | | |
| | SCSAS | | | | | | | | TISNLDP | | | | | |
| | | | | | | | | | EDIATYY | | | | | |
| | | | | | | | | | C | | | | | |
| ITI_ | DIQMTQT | 1056 | QDI-NNY | 1126 | LNWYQQK | 1190 | YTS | 1242 | SLHSGAP | 1293 | QQYSKLP | 1360 | FGGGTKL | 1427 |
| 14 | PSSLSAS | | | | PDGTVKL | | | | SRFSGSG | | WT | | EIK | |
| 5L | LGDRVTI | | | | LIF | | | | SGTDYSL | | | | | |
| | SCSAS | | | | | | | | TISNLDP | | | | | |
| | | | | | | | | | EDIATYY | | | | | |
| | | | | | | | | | C | | | | | |
| ITI_ | DIQMTQT | 1047 | QGI-RNY | 1127 | LNWYQQK | 1176 | YTS | 1242 | SLHSGVP | 1279 | QQYSKLP | 1360 | FGGGTKL | 1427 |
| 14 | TSSLSAS | | | | PDGTVKL | | | | SRFSGSG | | WT | | EIK | |
| 6L | LGDRVTI | | | | LIY | | | | SGTDYSL | | | | | |
| | SCSAS | | | | | | | | TISNLEP | | | | | |
| | | | | | | | | | EDIATYY | | | | | |
| | | | | | | | | | C | | | | | |
| ITI_ | DIQMTQT | 1048 | QGI-SNY | 1114 | LNWYQQK | 1176 | YTS | 1242 | TLHSGVP | 1294 | QQYSKLP | 1360 | FGGGTKL | 1427 |
| 16 | TSSLSAS | | | | PDGTVKL | | | | SRFSGSG | | WT | | EIK | |
| 2L | LGDRVTI | | | | LIY | | | | SGTDYSL | | | | | |
| | SCTAS | | | | | | | | TINNLEP | | | | | |
| | | | | | | | | | EDIATYY | | | | | |
| | | | | | | | | | C | | | | | |
| ITI_ | DIQMTQT | 1047 | QDI---- | 1110 | LNWYQQK | 1176 | YTS | 1242 | SLHSGVP | 1279 | QQYSKLP | 1360 | FGGGTKL | 1427 |
| 16 | TSSLSAS | | --SNY | | PDGTVKL | | | | SRFSGSG | | WT | | EIK | |
| 6L | LGDRVTI | | | | LIY | | | | SGTDYSL | | | | | |
| | SCSAS | | | | | | | | TISNLEP | | | | | |
| | | | | | | | | | EDIATYY | | | | | |
| | | | | | | | | | C | | | | | |
| ITI_ | DIQMTQT | 1047 | QGI---- | 1128 | LNWYQQK | 1176 | YTS | 1242 | SLHSGVP | 1279 | QQYSKLP | 1360 | FGGGTKL | 1427 |
| 16 | TSSLSAS | | --TKY | | PDGTVKL | | | | SRFSGSG | | WT | | EIK | |
| 9L | LGDRVTI | | | | LIY | | | | SGTDYSL | | | | | |
| | SCSAS | | | | | | | | TISNLEP | | | | | |
| | | | | | | | | | EDIATYY | | | | | |
| | | | | | | | | | C | | | | | |
| ITI_ | DIVLTQS | 1041 | QSVDY-- | 1106 | INWYQQR | 1191 | AAS | 1239 | NLESGIP | 1295 | QHCYEDP | 1373 | FGGGTKL | 1427 |
| 20 | PASLAVS | | DGESY | | PGQPAKL | | | | ARFSGSG | | WT | | EIK | |
| 0L | LGQRATI | | | | LIF | | | | SGTDFTL | | | | | |
| | SCKAS | | | | | | | | NIHPVEE | | | | | |
| | | | | | | | | | EDAASYY | | | | | |
| | | | | | | | | | C | | | | | |
| ITI_ | DIQMTQT | 1057 | QDI-SNY | 1110 | LNWYQQK | 1176 | YTS | 1242 | RLHSGVP | 1296 | QQGNTLP | 1374 | FGGGTKL | 1427 |
| 23 | TSSLSAS | | | | PDGTVKL | | | | SRFSGSG | | YT | | EIK | |
| 6L | LGDRVTI | | | | LIY | | | | SGTDYSL | | | | | |
| | SCRAS | | | | | | | | TISNLEQ | | | | | |
| | | | | | | | | | EDIATYF | | | | | |
| | | | | | | | | | C | | | | | |
| ITI_ | DIQMTQT | 1047 | QGI-SNY | 1114 | LNWYQQK | 1176 | YTS | 1242 | SLHSGVP | 1279 | QQYSKLP | 1375 | FGGGTKL | 1427 |
| 23 | TSSLSAS | | | | PDGTVKL | | | | SRFSGSG | | RT | | EIK | |
| 7L | LGDRVTI | | | | LIY | | | | SGTDYSL | | | | | |
| | SCSAS | | | | | | | | TISNLEP | | | | | |
| | | | | | | | | | EDIATYY | | | | | |
| | | | | | | | | | C | | | | | |
| | | Seq. | | Seq. | | Seq. | | Seq. | | Seq. | | Seq. | | Seq. |
| | FR1 | ID | CDR1 | ID | FR2 | ID | CDR2 | ID | FR3 | ID | CDR3 | ID | FR4 ID | ID |

Consensus Cluster #7

| | [D/E][V | | | | | | | | | | | | | |
|---|---|---|---|---|---|---|---|---|---|---|---|---|---|---|
| | /N][V/L | | | | | | | | | | | | | |
| | ][M/L]T | | | | | | | | [K/N][L | | | | | |
| | Q[T/S]P | | | | | | | | /R/V][D | | | | | |
| | [L/A][T | | | | | | | | /P/F/V] | | | | | |
| | /I/S][L | | | | | | | | SGVP[D/ | | | | | |
| | /M][S/P | | | | | | | | G]RF[T/ | | | | | |
| | /T][V/A | | | | | | | | S]G[S/N | | | | | |
| | /I][T/S | | | | | | | | ]GSG[T/ | | | | | |
| | /N][I/P | | [Q/S][S | | [L/M][N | | | | N][D/S/ | | | | | |
| | /L/V]G[ | | /N][L/V | | /H/E/Y/ | | | | Y/E][F/ | | [V/F/W] | | | |
| | Q/E/D/H | | /I][L/- | | S]W[L/Y | | | | Y][T/S] | | Q[G/A/N | | | |
| | ][P/K/Q | | /V][Y/- | | ][L/Q]Q | | | | L[K/T/N | | /L/V][T | | | |
| | /T][A/V | | /H/D][S | | [R/K][P | | | | ]IS[R/S | | /S][H/G | | | |
| | ][S/T][ | | /-][N/- | | /S][G/S | | | | ][V/M]E | | ][F/-][ | | [F/L]G[ | |
| | I/M][S/ | | /D][G/- | | ][Q/T]S | | | | AED[L/V | | P/F/V][ | | G/S/A/T | |
| | T]C[K/S | | ][K/-/N | | P[K/N/E | | | | ][G/A][ | | M/P][Y/ | | ]GT[K/N | |
| | /R][S/A | | /I][T/S | | ][R/L][ | | [L/D/K] | | V/T/I]Y | | L/W/H/Q | | /E]LE[I | |
| | ][S/G] | 1058 | ]Y | 1129 | L/W]IY | 1192 | [V/T]S | 1246 | YC | 1297 | ][T/A] | 1376 | /L]K | 1436 |
| H5S14- | DVVMTQT | 1059 | QSLLDSD | 1130 | LNWLLQR | 1193 | LVS | 1247 | KLDSGVP | 1298 | WQLTH-F | 1377 | FGGGTKL | 1427 |
| 11AL | PLTLSVT | | GKTY | | PGQSPKR | | | | DRFTGSG | | PQT | | EIK | |
| | IGQPASI | | | | LIY | | | | SGTDFTL | | | | | |
| | SCKSS | | | | | | | | KISRVEA | | | | | |
| | | | | | | | | | EDLGVYY | | | | | |
| | | | | | | | | | C | | | | | |
| H5S14- | DVLMTQT | 1060 | QSIVHSN | 1131 | LEWYLĄK | 1194 | KVS | 1248 | NRFSGVP | 1299 | FQGSH-V | 1378 | FGGGTKL | 1427 |
| 13AL | PLSLPVS | | GNTY | | PGQSPKL | | | | DRFSGSG | | PWT | | EIK | |
| An | LGDQASI | | | | LIY | | | | SGTDFTL | | | | | |
| d | SCRSS | | | | | | | | KISRVEA | | | | | |
| H5S19 | | | | | | | | | EDLGVYY | | | | | |
| - | | | | | | | | | C | | | | | |
| 7AL | | | | | | | | | | | | | | |
| H5S14- | DVVMTQT | 1059 | QSLLDSD | 1130 | LNWLLQR | 1193 | LVS | 1247 | KLDSGVP | 1298 | WQVTH-F | 1379 | FGGGTKL | 1427 |
| 17AL | PLTLSVT | | GKTY | | PGQSPKR | | | | DRFTGSG | | PQT | | EIK | |
| | IGQPASI | | | | LIY | | | | SGTDFTL | | | | | |
| | SCKSS | | | | | | | | KISRVEA | | | | | |
| | | | | | | | | | EDLGVYY | | | | | |
| | | | | | | | | | C | | | | | |
| H5S14- | DVVMTQT | 1059 | QSLLDSD | 1130 | LNWLLQR | 1193 | LVS | 1247 | KLDSGVP | 1298 | WQGTH-F | 1380 | FGGGTKL | 1427 |
| 2AL | PLTLSVT | | GKTY | | PGQSPKR | | | | DRFTGSG | | PHA | | EIK | |
| | IGQPASI | | | | LIY | | | | SGTDFTL | | | | | |
| | SCKSS | | | | | | | | KISRVEA | | | | | |
| | | | | | | | | | EDLGVYY | | | | | |
| | | | | | | | | | C | | | | | |
| H5S15- | DVVMTQT | 1059 | QSLLDSD | 1130 | LNWLLQR | 1193 | LVS | 1247 | KLDSGVP | 1300 | WQGTH-F | 1381 | FGGGTKL | 1427 |
| 12CL | PLTLSVT | | GKTY | | PGQSPKR | | | | DRFTGSG | | PQT | | EIK | |
| | IGQPASI | | | | LIY | | | | SGTDFTL | | | | | |
| | SCKSS | | | | | | | | KISRVEA | | | | | |
| | | | | | | | | | EDLGIYY | | | | | |
| | | | | | | | | | C | | | | | |
| H5S15- | DVLMTQT | 1060 | QSIVHSN | 1132 | LEWYLQK | 1195 | KVS | 1248 | NRFSGVP | 1299 | FQGSH-V | 1382 | FGAGTKL | 1429 |
| 16AL | PLSLPVS | | GITY | | PGQSPEL | | | | DRFSGSG | | PLT | | ELK | |
| | LGDQASI | | | | LIY | | | | SGTDFTL | | | | | |
| | SCRSS | | | | | | | | KISRVEA | | | | | |
| | | | | | | | | | EDLGVYY | | | | | |
| | | | | | | | | | C | | | | | |
| H5S15- | DVVMTQT | 1061 | QSLLDSD | 1130 | LNWLLQR | 1193 | LVS | 1247 | KRDSGVP | 1301 | WQNTH-F | 1383 | FGGGTKL | 1427 |
| 17AL | PLTLSVT | | GKTY | | PGQSPKR | | | | DRFTGSG | | PQT | | EIK | |
| | VGQPASI | | | | LIY | | | | SGTDFTL | | | | | |
| | SCKSS | | | | | | | | KISRVEA | | | | | |
| | | | | | | | | | EDLGVYY | | | | | |
| | | | | | | | | | C | | | | | |
| H5S15- | ENVLTQS | 1062 | SSV---- | 1133 | MHWYQQK | 1196 | DTS | 1233 | KLPSGVP | 1302 | FQGSG-F | 1384 | FGSGTKL | 1428 |
| 1AL | PAIMSAS | | --SY | | SSTSPKL | | | | GRFSGSG | | PLT | | EIK | |
| | PGEKVTM | | | | WIY | | | | SGNSYSL | | | | | |
| | TCSAG | | | | | | | | TISSMEA | | | | | |
| | | | | | | | | | EDVATYY | | | | | |
| | | | | | | | | | C | | | | | |
| H5S15- | DVVMTQT | 1059 | QSLLDSD | 1130 | LNWLLQR | 1193 | LVS | 1247 | KLDSGVP | 1298 | WQATH-F | 1385 | FGGGTNL | 1430 |
| 31AL | PLTLSVT | | GKTY | | PGQSPKR | | | | DRFTGSG | | PQT | | EIK | |
| | IGQPASI | | | | LIY | | | | SGTDFTL | | | | | |
| | SCKSS | | | | | | | | KISRVEA | | | | | |
| | | | | | | | | | EDLGVYY | | | | | |
| | | | | | | | | | C | | | | | |
| H5S15- | DVLMTQT | 1060 | QSIVHSN | 1131 | LEWYLQK | 1194 | KVS | 1248 | NRFSGVP | 1299 | FQGSH-V | 1382 | FGAGTKL | 1429 |
| 3AL | PLSLPVS | | GNTY | | PGQSPKL | | | | DRFSGSG | | PLT | | ELK | |
| | LGDQASI | | | | LIY | | | | SGTDFTL | | | | | |
| | SCRSS | | | | | | | | KISRVEA | | | | | |
| | | | | | | | | | EDLGVYY | | | | | |
| | | | | | | | | | C | | | | | |
| H5S15- | DVLMTQT | 1063 | QSIVHSN | 1131 | LEWYLQK | 1194 | KVS | 1248 | NRFSGVP | 1299 | FQGSH-V | 1382 | FGAGTKL | 1429 |
| 3BL | PLSLTVS | | GNTY | | PGQSPKL | | | | DRFSGSG | | PLT | | ELK | |
| | LGHQASI | | | | LIY | | | | SGTDFTL | | | | | |
| | SCRSS | | | | | | | | KISRVEA | | | | | |
| | | | | | | | | | EDLGVYY | | | | | |
| | | | | | | | | | C | | | | | |
| H5S15- | DVVMTQT | 1059 | QSLLDSD | 1130 | LNWLLQR | 1193 | LVS | 1247 | KLDSGVP | 1303 | WQNTH-F | 1383 | FGGGTKL | 1427 |
| 6AL | PLTLSVT | | GKTY | | PGQSPKR | | | | DRFTGSG | | PQT | | EIK | |
| | IGQPASI | | | | LIY | | | | SGTEFTL | | | | | |
| | SCKSS | | | | | | | | KISRVEA | | | | | |
| | | | | | | | | | EDLGVYY | | | | | |
| | | | | | | | | | C | | | | | |
| H5S20- | DVVMTQT | 1059 | QSLLDSD | 1130 | LSWLLQR | 1197 | LVS | 1247 | KLDSGVP | 1298 | WQNTH-F | 1383 | FGGGTKL | 1427 |
| 19AL | PLTLSVT | | GKTY | | PGQSPKR | | | | DRFTGSG | | PQT | | EIK | |
| | IGQPASI | | | | LIY | | | | SGTDFTL | | | | | |
| | SCKSS | | | | | | | | KISRVEA | | | | | |
| | | | | | | | | | EDLGVYY | | | | | |
| | | | | | | | | | C | | | | | |
| H5S20- | DVVMTQT | 1064 | QSLLDSD | 1130 | LSWLLQR | 1197 | LVS | 1247 | KLDSGVP | 1298 | WQNTH-F | 1383 | FGGGTKL | 1427 |
| 19BL | PLSLSVT | | GKTY | | PGQSPKR | | | | DRFTGSG | | PQT | | EIK | |
| | IGQPASI | | | | LIY | | | | SGTDFTL | | | | | |
| | SCKSS | | | | | | | | KISRVEA | | | | | |
| | | | | | | | | | EDLGVYY | | | | | |
| | | | | | | | | | C | | | | | |
| H5S20- | DVLMTQT | 1060 | QSIVHSN | 1131 | LEWYLQK | 1194 | KVS | 1248 | NRVSGVP | 1304 | FQGSH-V | 1382 | FGAGTKL | 1429 |
| 21AL | PLSLPVS | | GNTY | | PGQSPKL | | | | DRFSGSG | | PLT | | ELK | |
| | LGDQASI | | | | LIY | | | | SGTDFTL | | | | | |
| | SCRSS | | | | | | | | KISRVEA | | | | | |
| | | | | | | | | | EDLGVYY | | | | | |
| | | | | | | | | | C | | | | | |
| H5S20- | DVVMTQT | 1059 | QSLLDSD | 1130 | LNWLLQR | 1193 | LVS | 1247 | KLDSGVP | 1298 | WQNTH-F | 1383 | LGGGTKL | 1437 |
| 24AL | PLTLSVT | | GKTY | | PGQSPKR | | | | DRFTGSG | | PQT | | EIK | |
| | IGQPASI | | | | LIY | | | | SGTDFTL | | | | | |
| | SCKSS | | | | | | | | KISRVEA | | | | | |
| | | | | | | | | | EDLGVYY | | | | | |
| | | | | | | | | | C | | | | | |
| H5S20- | DVVMTQT | 1059 | QSLLDSD | 1130 | LNWLLQR | 1193 | LVS | 1247 | KLDSGVP | 1298 | WQGTH-F | 1381 | FGGGTKL | 1427 |
| 25AL | PLTLSVT | | GKTY | | PGQSPKR | | | | DRFTGSG | | PQT | | EIK | |
| | IGQPASI | | | | LIY | | | | SGTDFTL | | | | | |
| | SCKSS | | | | | | | | KISRVEA | | | | | |
| | | | | | | | | | EDLGVYY | | | | | |
| | | | | | | | | | C | | | | | |
| H5S20- | DVVMTQT | 1059 | QSLLDSD | 1130 | LYWLLQR | 1198 | LVS | 1247 | KLDSGVP | 1305 | WQNTH-F | 1383 | FGGGTKL | 1427 |
| 26AL | PLTLSVT | | GKTY | | PGQSPKR | | | | DRFTGSG | | PQT | | EIK | |
| | IGQPASI | | | | LIY | | | | SGTYFTL | | | | | |
| | SCKSS | | | | | | | | KISRVEA | | | | | |
| | | | | | | | | | EDLGVYY | | | | | |
| | | | | | | | | | C | | | | | |
| H5S20- | DVVMTQT | 1059 | QSLLDSD | 1130 | LNWLLQR | 1193 | LVS | 1247 | KVDSGVP | 1306 | WQNTH-F | 1383 | FGGGTKL | 1427 |
| 31AL | PLTLSVT | | GKTY | | PGQSPKR | | | | DRFTGSG | | PQT | | EIK | |
| | IGQPASI | | | | LIY | | | | SGTDFTL | | | | | |
| | SCKSS | | | | | | | | KISRVEA | | | | | |
| | | | | | | | | | EDLGVYY | | | | | |
| | | | | | | | | | C | | | | | |
| H5S20- | DVLMTQT | 1065 | QNIVHSN | 1134 | LEWYLĄK | 1194 | KVS | 1248 | NRFSGVP | 1299 | FQGSH-V | 1382 | FGAGTKL | 1429 |
| 39AL | PLSLPVS | | GNTY | | PGQSPKL | | | | DRFSGSG | | PLT | | ELK | |
| | LGDQVSI | | | | LIY | | | | SGTDFTL | | | | | |
| | SCRSS | | | | | | | | KISRVEA | | | | | |
| | | | | | | | | | EDLGVYY | | | | | |
| | | | | | | | | | C | | | | | |
| H5S20- | DVVMTQT | 1059 | QSLLDSD | 1130 | LNWLLQR | 1193 | LVS | 1247 | KLDSGVP | 1298 | WQATH-F | 1385 | FGGGTKL | 1427 |
| 3BL | PLTLSVT | | GKTY | | PGQSPKR | | | | DRFTGSG | | PQT | | EIK | |
| | IGQPASI | | | | LIY | | | | SGTDFTL | | | | | |
| | SCKSS | | | | | | | | KISRVEA | | | | | |
| | | | | | | | | | EDLGVYY | | | | | |
| | | | | | | | | | C | | | | | |
| H5S20- | DVVMTQT | 1059 | QSLLYSN | 1135 | LNWLLQR | 1193 | LVS | 1247 | KLDSGVP | 1298 | VQGTHFP | 1386 | FGGGTKL | 1427 |
| 41AL | PLTLSVT | | GKTY | | PGQSPKR | | | | DRFTGSG | | MYT | | EIK | |
| | IGQPASI | | | | LIY | | | | SGTDFTL | | | | | |
| | SCKSS | | | | | | | | KISRVEA | | | | | |
| | | | | | | | | | EDLGVYY | | | | | |
| | | | | | | | | | C | | | | | |
| H5S20- | DVVMTQT | 1059 | QSLLDSD | 1130 | LNWLLQR | 1193 | LVS | 1247 | KLDSGVP | 1298 | WQNTH-F | 1383 | FGGGTKL | 1427 |
| 7AL | PLTLSVT | | GKTY | | PGQSPKR | | | | DRFTGSG | | PQT | | EIK | |
| | IGQPASI | | | | LIY | | | | SGTDFTL | | | | | |
| | SCKSS | | | | | | | | KISRVEA | | | | | |
| | | | | | | | | | EDLGVYY | | | | | |
| | | | | | | | | | C | | | | | |
| H5S20- | DVVMTQT | 1059 | QSLLDSD | 1130 | LNWLLQR | 1193 | LVS | 1247 | KLDSGVP | 1300 | WQNTH-F | 1383 | FGGGTKL | 1427 |
| 7BL | PLTLSVT | | GKTY | | PGQSPKR | | | | DRFTGSG | | PQT | | EIK | |
| | IGQPASI | | | | LIY | | | | SGTDFTL | | | | | |
| | SCKSS | | | | | | | | KISRVEA | | | | | |
| | | | | | | | | | EDLGIYY | | | | | |
| | | | | | | | | | C | | | | | |
| H5S20- | DVVMTQT | 1066 | QSLLDSD | 1130 | LNWLLQR | 1193 | LVS | 1247 | KLDSGVP | 1298 | WQNTH-F | 1383 | FGGGTKL | 1427 |
| 7CL | PLTLSIT | | GKTY | | PGQSPKR | | | | DRFTGSG | | PQT | | EIK | |
| | IGQPASI | | | | LIY | | | | SGTDFTL | | | | | |
| | SCKSS | | | | | | | | KISRVEA | | | | | |
| | | | | | | | | | EDLGVYY | | | | | |
| | | | | | | | | | C | | | | | |
| H5S20- | DVVMTQT | 1059 | QSLLDSD | 1130 | LNWLLQR | 1193 | LVS | 1247 | KLDSGVP | 1298 | WQNTH-F | 1383 | FGGGTEL | 1438 |
| 7DL | PLTLSVT | | GKTY | | PGQSPKR | | | | DRFTGSG | | PQT | | EIK | |
| | IGQPASI | | | | LIY | | | | SGTDFTL | | | | | |
| | SCKSS | | | | | | | | KISRVEA | | | | | |
| | | | | | | | | | EDLGVYY | | | | | |
| | | | | | | | | | C | | | | | |
| H5S20- | DVVMTQT | 1067 | QSLLDSD | 1130 | LNWLLQR | 1193 | LVS | 1247 | KLDSGVP | 1298 | WQNTH-F | 1383 | FGGGTKL | 1427 |
| 7EL | PLTLSVT | | GKTY | | PGQSPKR | | | | DRFTGSG | | PQT | | EIK | |
| | IGQTASI | | | | LIY | | | | SGTDFTL | | | | | |
| | SCKSS | | | | | | | | KISRVEA | | | | | |
| | | | | | | | | | EDLGVYY | | | | | |
| | | | | | | | | | C | | | | | |
| H5S20- | DVLMTQT | 1068 | QSIVHSN | 1131 | LEWYLĄK | 1194 | KVS | 1248 | NRFSGVP | 1299 | FQGSH-V | 1382 | FGAGTKL | 1429 |
| 9AL | PLSLPVN | | GNTY | | PGQSPKL | | | | DRFSGSG | | PLT | | ELK | |
| | LGDQASI | | | | LIY | | | | SGTDFTL | | | | | |
| | SCRSS | | | | | | | | KISRVEA | | | | | |
| | | | | | | | | | EDLGVYY | | | | | |
| | | | | | | | | | C | | | | | |
| H5S20- | DVLMTQT | 1060 | QSIVHSN | 1131 | LEWYLĄK | 1194 | KVS | 1248 | NRFSGVP | 1299 | FQGSH-V | 1382 | FGTGTKL | 1439 |
| 9DL | PLSLPVS | | GNTY | | PGQSPKL | | | | DRFSGSG | | PLT | | ELK | |
| | LGDQASI | | | | LIY | | | | SGTDFTL | | | | | |
| | SCRSS | | | | | | | | KISRVEA | | | | | |
| | | | | | | | | | EDLGVYY | | | | | |
| | | | | | | | | | C | | | | | |
| H5S20- | DVLMTQT | 1060 | QSIVHSN | 1131 | LEWYLQK | 1199 | KVS | 1248 | NRFSGVP | 1299 | FQGSH-V | 1382 | FGTGTKL | 1439 |
| 9EL | PLSLPVS | | GNTY | | PGQSPNL | | | | DRFSGSG | | PLT | | ELK | |
| | LGDQASI | | | | LIY | | | | SGTDFTL | | | | | |
| | SCRSS | | | | | | | | KISRVEA | | | | | |
| | | | | | | | | | EDLGVYY | | | | | |
| | | | | | | | | | C | | | | | |
| ITI_ | DVVMTQT | 1059 | QSLLDSD | 1130 | LNWLLQR | 1193 | LVS | 1247 | KLDSGVP | 1307 | WQATH-F | 1385 | FGGGTKL | 1427 |
| 04 | PLTLSVT | | GKTY | | PGQSPKR | | | | DRFTGNG | | PQT | | EIK | |
| 7L | IGQPASI | | | | LIY | | | | SGTDFTL | | | | | |
| | SCKSS | | | | | | | | KISRVEA | | | | | |
| | | | | | | | | | EDLGVYY | | | | | |
| | | | | | | | | | C | | | | | |
| ITI_ | DVLMTQT | 1060 | QSIVHSN | 1131 | LEWYLQK | 1194 | KVS | 1248 | NRFSGVP | 1308 | FQGSH-V | 1382 | FGAGTKL | 1429 |
| 09 | PLSLPVS | | GNTY | | PGQSPKL | | | | DRFSGSG | | PLT | | ELK | |
| 1L | LGDQASI | | | | LIY | | | | SGTDFTL | | | | | |
| | SCRSS | | | | | | | | NISRVEA | | | | | |
| | | | | | | | | | EDLGVYY | | | | | |
| | | | | | | | | | C | | | | | |

Consensus Cluster #3

| | | | | | | | | | NLASGVP | | | | | |
|---|---|---|---|---|---|---|---|---|---|---|---|---|---|---|
| | | | | | | | | | [S/A/V] | | | | | |
| | | | | | | | | | RFSGSGS | | | | | |
| | QIVLTQS | | | | [M/L][H | | | | GT[F/S] | | | | | |
| | PAI[M/V | | | | /F/Y/Q] | | | | [Y/F][S | | HQW[S/N | | | |
| | /I]S[A/ | | | | W[Y/F]Q | | | | /Y]LT[I | | ][S/T/N | | | |
| | T]S[L/P | | | | Q[K/R][ | | | | /L]S[S/ | | /-][Y/F | | FG[G/A] | |
| | ]G[E/A] | | S[S/T]V | | S/P]G[S | | | | G][V/M] | | /S][T/L | | G[T/A][ | |
| | [E/K][I | | [-/D/S] | | /T]SPKL | | | | EAEDAA[ | | /A/P/Y] | | K/I/M/E | |
| | /V]TLTC | | [-/S]S[ | | [L/W][I | | [T/S/G] | | D/S]Y[Y | | [W/R/L/ | | ]LE[I/L | |
| | SA[S/R] | 1069 | Y/F] | 1136 | /L]Y | 1200 | [T/A]S | 1249 | /F]C | 1309 | P]T | 1387 | ][K/-] | 1440 |
| H5S14- | QIVLTQS | 1070 | SSV--SY | 1137 | MQWYQQK | 1201 | STS | 1241 | NLASGVP | 1310 | HQWS-SY | 1388 | FGGGTEL | 1441 |
| 3AL | PAIMSAS | | | | SGTSPKL | | | | SRFSGSG | | PT | | EI- | |
| | LGEEITL | | | | LIY | | | | SGTFYSL | | | | | |
| | TCSAS | | | | | | | | TISSVEA | | | | | |
| | | | | | | | | | EDAADYY | | | | | |
| | | | | | | | | | C | | | | | |
| H5S14- | QIVLTQS | 1071 | SSV--SY | 1137 | MHWYQQK | 1202 | STS | 1241 | NLASGVP | 1310 | HQWS-SY | 1389 | FGAGTKL | 1429 |
| 5AL | PAIISAS | | | | SGTSPKL | | | | SRFSGSG | | LT | | ELK | |
| | LGEEVTL | | | | LIY | | | | SGTFYSL | | | | | |
| | TCSAS | | | | | | | | TISSVEA | | | | | |
| | | | | | | | | | EDAADYY | | | | | |
| | | | | | | | | | C | | | | | |
| H5S15- | QIVLTQS | 1070 | SSV--SF | 1138 | MHWYQQK | 1202 | STS | 1241 | NLASGVP | 1310 | HQWSSYL | 1390 | FGGGAKL | 1431 |
| 8AL | PAIMSAS | | | | SGTSPKL | | | | SRFSGSG | | WT | | EIK | |
| | LGEEITL | | | | LIY | | | | SGTFYSL | | | | | |
| | TCSAS | | | | | | | | TISSVEA | | | | | |
| | | | | | | | | | EDAADYY | | | | | |
| | | | | | | | | | C | | | | | |
| H5S19- | QIVLTQS | 1072 | SSVDSSY | 1139 | LFWYQQK | 1203 | STS | 1241 | NLASGVP | 1311 | HQWSSYP | 1391 | FGGGTIL | 1442 |
| 10AL | PAIMSAS | | | | PGSSPKL | | | | ARFSGSG | | WT | | EIK | |
| | PGEKVTL | | | | WIY | | | | SGTSYSL | | | | | |
| | TCSAS | | | | | | | | TISSMEA | | | | | |
| | | | | | | | | | EDAASYF | | | | | |
| | | | | | | | | | C | | | | | |
| H5S19- | QIVLTQS | 1072 | SSVDSSY | 1139 | LFWYQQK | 1203 | STS | 1241 | NLASGVP | 1311 | HQWSSYP | 1391 | FGGGTIL | 1443 |
| 10BL | PAIMSAS | | | | PGSSPKL | | | | ARFSGSG | | WT | | EI1 | |
| | PGEKVTL | | | | WIY | | | | SGTSYSL | | | | | |
| | TCSAS | | | | | | | | TISSMEA | | | | | |
| | | | | | | | | | EDAASYF | | | | | |
| | | | | | | | | | C | | | | | |
| H5S19- | QIVLTQS | 1072 | SSVDSSY | 1139 | LFWYQQK | 1203 | STS | 1241 | NLASGVP | 1312 | HQWSNFA | 1392 | FGGGTIL | 1442 |
| 14AL | PAIMSAS | | | | PGSSPKL | | | | ARFSGSG | | WT | | EIK | |
| | PGEKVTL | | | | WIY | | | | SGTSYYL | | | | | |
| | TCSAS | | | | | | | | TLSSMEA | | | | | |
| | | | | | | | | | EDAASYF | | | | | |
| | | | | | | | | | C | | | | | |
| H5S19- | QIVLTQS | 1072 | SSVDSSY | 1139 | LYWFQQK | 1204 | GTS | 1243 | NLASGVP | 1311 | HQWNSYP | 1393 | FGGGTKL | 1427 |
| 16AL | PAIMSAS | | | | PGSSPKL | | | | ARFSGSG | | WT | | EIK | |
| | PGEKVTL | | | | WIY | | | | SGTSYSL | | | | | |
| | TCSAS | | | | | | | | TISSMEA | | | | | |
| | | | | | | | | | EDAASYF | | | | | |
| | | | | | | | | | C | | | | | |
| H5S19- | QIVLTQS | 1072 | SSVDSSY | 1139 | LYWYQQK | 1205 | GTS | 1243 | NLASGVP | 1311 | HQWNSYP | 1393 | FGGGTKL | 1427 |
| 16BL | PAIMSAS | | | | PGSSPKL | | | | ARFSGSG | | WT | | EIK | |
| | PGEKVTL | | | | WIY | | | | SGTSYSL | | | | | |
| | TCSAS | | | | | | | | TISSMEA | | | | | |
| | | | | | | | | | EDAASYF | | | | | |
| | | | | | | | | | C | | | | | |
| H5S19- | QIVLTQS | 1073 | SSVSSSY | 1140 | LYWYQQK | 1205 | STS | 1241 | NLASGVP | 1311 | HQWSTYP | 1394 | FGGGTKL | 1427 |
| 18AL | PAIMSTS | | | | PGSSPKL | | | | ARFSGSG | | WT | | EIK | |
| | PGEKVTL | | | | WIY | | | | SGTSYSL | | | | | |
| | TCSAS | | | | | | | | TISSMEA | | | | | |
| | | | | | | | | | EDAASYF | | | | | |
| | | | | | | | | | C | | | | | |
| H5S19- | QIVLTQS | 1072 | SSVSSSY | 1140 | LYWYQQK | 1205 | STS | 1241 | NLASGVP | 1311 | HQWSSYP | 1391 | FGGGTKL | 1427 |
| 19AL | PAIMSAS | | | | PGSSPKL | | | | ARFSGSG | | WT | | EIK | |
| | PGEKVTL | | | | WIY | | | | SGTSYSL | | | | | |
| | TCSAS | | | | | | | | TISSMEA | | | | | |
| | | | | | | | | | EDAASYF | | | | | |
| | | | | | | | | | C | | | | | |
| H5S19- | QIVLTQS | 1072 | SSVDSSY | 1139 | LFWYQQK | 1203 | STS | 1241 | NLASGVP | 1311 | HQWNSYP | 1393 | FGGGTKL | 1427 |
| 3AL | PAIMSAS | | | | PGSSPKL | | | | ARFSGSG | | WT | | EIK | |
| | PGEKVTL | | | | WIY | | | | SGTSYSL | | | | | |
| | TCSAS | | | | | | | | TISSMEA | | | | | |
| | | | | | | | | | EDAASYF | | | | | |
| | | | | | | | | | C | | | | | |
| H5S19- | QIVLTQS | 1072 | SSVDSSY | 1139 | LFWYQQK | 1203 | STS | 1241 | NLASGVP | 1313 | HQWSSYA | 1395 | FGGGTIL | 1442 |
| 4AL | PAIMSAS | | | | PGSSPKL | | | | ARFSGSG | | WT | | EIK | |
| | PGEKVTL | | | | WIY | | | | SGTSYYL | | | | | |
| | TCSAS | | | | | | | | TISSMEA | | | | | |
| | | | | | | | | | EDAASYF | | | | | |
| | | | | | | | | | C | | | | | |
| H5S19- | QIVLTQS | 1072 | SSVDSSY | 1139 | LFWYQQK | 1206 | STS | 1241 | NLASGVP | 1313 | HQWSNYA | 1396 | FGGGTIL | 1442 |
| 5AL | PAIMSAS | | | | PGSSPKL | | | | ARFSGSG | | WT | | EIK | |
| | PGEKVTL | | | | WLY | | | | SGTSYYL | | | | | |
| | TCSAS | | | | | | | | TISSMEA | | | | | |
| | | | | | | | | | EDAASYF | | | | | |
| | | | | | | | | | C | | | | | |
| H5S20- | QIVLTQS | 1070 | SSV--SY | 1137 | MHWYQQR | 1207 | STS | 1241 | NLASGVP | 1310 | HQWS-SY | 1397 | FGGGTKL | 1427 |
| 10AL | PAIMSAS | | | | SGTSPKL | | | | SRFSGSG | | RT | | EIK | |
| | LGEEITL | | | | LIY | | | | SGTFYSL | | | | | |
| | TCSAS | | | | | | | | TISSVEA | | | | | |
| | | | | | | | | | EDAADYY | | | | | |
| | | | | | | | | | C | | | | | |
| H5S20- | QIVLTQS | 1070 | SSV--SY | 1137 | MHWYQQK | 1202 | SAS | 1240 | NLASGVP | 1310 | HQWS-SY | 1397 | FGGGTKL | 1427 |
| 15AL | PAIMSAS | | | | SGTSPKL | | | | SRFSGSG | | RT | | EIK | |
| | LGEEITL | | | | LIY | | | | SGTFYSL | | | | | |
| | TCSAS | | | | | | | | TISSVEA | | | | | |
| | | | | | | | | | EDAADYY | | | | | |
| | | | | | | | | | C | | | | | |
| H5S20- | QIVLTQS | 1070 | SSV--SY | 1137 | MHWYQQK | 1208 | TTS | 1250 | NLASGVP | 1310 | HQWSSYT | 1398 | FGGGTKL | 1427 |
| 22AL | PAIMSAS | | | | SGSSPKL | | | | SRFSGSG | | WT | | EIK | |
| | LGEEITL | | | | LIY | | | | SGTFYSL | | | | | |
| | TCSAS | | | | | | | | TISSVEA | | | | | |
| | | | | | | | | | EDAADYY | | | | | |
| | | | | | | | | | C | | | | | |
| ITI_ | QIVLTQS | 1072 | SSVDSSY | 1139 | LFWYQQK | 1203 | STS | 1241 | NLASGVP | 1311 | HQWSSYP | 1391 | FGGGTKL | 1427 |
| 02 | PAIMSAS | | | | PGSSPKL | | | | ARFSGSG | | WT | | EIK | |
| 7L | PGEKVTL | | | | WIY | | | | SGTSYSL | | | | | |
| | TCSAS | | | | | | | | TISSMEA | | | | | |
| | | | | | | | | | EDAASYF | | | | | |
| | | | | | | | | | C | | | | | |
| ITI_ | QIVLTQS | 1072 | SSVDSSY | 1139 | LYWYQQK | 1205 | STS | 1241 | NLASGVP | 1311 | HQWNSYP | 1393 | FGGGTKL | 1427 |
| 02 | PAIMSAS | | | | PGSSPKL | | | | ARFSGSG | | WT | | EIK | |
| 8L | PGEKVTL | | | | WIY | | | | SGTSYSL | | | | | |
| | TCSAS | | | | | | | | TISSMEA | | | | | |
| | | | | | | | | | EDAASYF | | | | | |
| | | | | | | | | | C | | | | | |
| ITI_ | QIVLTQS | 1072 | SSVDSSY | 1139 | LFWYQQK | 1203 | STS | 1241 | NLASGVP | 1311 | HQWSSYA | 1395 | FGGGTIL | 1442 |
| 02 | PAIMSAS | | | | PGSSPKL | | | | ARFSGSG | | WT | | EIK | |
| 9L | PGEKVTL | | | | WIY | | | | SGTSYSL | | | | | |
| | TCSAS | | | | | | | | TISSMEA | | | | | |
| | | | | | | | | | EDAASYF | | | | | |
| | | | | | | | | | C | | | | | |
| ITI_ | QIVLTQS | 1072 | SSVDSSY | 1139 | LYWFQQK | 1204 | GTS | 1243 | NLASGVP | 1314 | HQWNSYP | 1393 | FGGGTKL | 1427 |
| 03 | PAIMSAS | | | | PGSSPKL | | | | VRFSGSG | | WT | | EIK | |
| 0L | PGEKVTL | | | | WIY | | | | SGTSYSL | | | | | |
| | TCSAS | | | | | | | | TISSMEA | | | | | |
| | | | | | | | | | EDAASYF | | | | | |
| | | | | | | | | | C | | | | | |
| ITI_ | QIVLTQS | 1072 | SSVDSSY | 1139 | LFWYQQK | 1203 | STS | 1241 | NLASGVP | 1311 | HQWSSYP | 1391 | FGGGTML | 1444 |
| 03 | PAIMSAS | | | | PGSSPKL | | | | ARFSGSG | | WT | | EIK | |
| 3L | PGEKVTL | | | | WIY | | | | SGTSYSL | | | | | |
| | TCSAS | | | | | | | | TISSMEA | | | | | |
| | | | | | | | | | EDAASYF | | | | | |
| | | | | | | | | | C | | | | | |
| ITI_ | QIVLTQS | 1072 | SSVDSSY | 1139 | LYWYQQK | 1205 | GTS | 1243 | NLASGVP | 1314 | HQWNSYP | 1393 | FGGGTKL | 1427 |
| 03 | PAIMSAS | | | | PGSSPKL | | | | VRFSGSG | | WT | | EIK | |
| 8L | PGEKVTL | | | | WIY | | | | SGTSYSL | | | | | |
| | TCSAS | | | | | | | | TISSMEA | | | | | |
| | | | | | | | | | EDAASYF | | | | | |
| | | | | | | | | | C | | | | | |
| ITI_ | QIVLTQS | 1074 | SSV--SY | 1137 | MFWYQQK | 1209 | TTS | 1250 | NLASGVP | 1315 | HQWSSYT | 1398 | FGGGTKL | 1427 |
| 12 | PAIMSAS | | | | SGTSPKL | | | | SRFSGSG | | WT | | EIK | |
| 7L | LGEEITL | | | | LIY | | | | SGTFFSL | | | | | |
| | TCSAR | | | | | | | | TISGVEA | | | | | |
| | | | | | | | | | EDAADYY | | | | | |
| | | | | | | | | | C | | | | | |
| ITI_ | QIVLTQS | 1075 | STV--SY | 1141 | MFWYQQK | 1209 | STS | 1241 | NLASGVP | 1316 | HQWSSYT | 1398 | FGGGTKL | 1427 |
| 12 | PAIVSAS | | | | SGTSPKL | | | | SRFSGSG | | WT | | EIK | |
| 8L | LGAEITL | | | | LIY | | | | SGTFYSL | | | | | |
| | TCSAR | | | | | | | | TISGVEA | | | | | |
| | | | | | | | | | EDAADYY | | | | | |
| | | | | | | | | | C | | | | | |
| | | Seq. | | Seq. | | Seq. | | Seq. | | Seq. | | Seq. | | Seq. |
| | FR1 | ID | CDR1 | ID | FR2 | ID | CDR2 | ID | FR3 | ID | CDR3 | ID | FR4 ID | ID |

Consensus Cluster #5

| | | | | | | | | | [N/T/R] | | | | | |
|---|---|---|---|---|---|---|---|---|---|---|---|---|---|---|
| | | | | | | | | | [L/R/G] | | | | | |
| | | | | | | | | | [A/D/E/ | | | | | |
| | [Q/D]I[ | | | | | | | | G/V][S/ | | | | | |
| | V/Q/L/K | | | | | | | | D]GVP[A | | | | | |
| | ][L/M][ | | | | | | | | /K/D/S] | | | | | |
| | T/S]QSP | | | | | | | | RF[S/T] | | | | | |
| | [A/S][I | | | | | | | | GS[G/R] | | | | | |
| | /S][M/L | | | | | | | | SG[T/S/ | | | | | |
| | ][S/A/P | | [S/Q][S | | [L/I][H | | | | A/Q][S/ | | | | | |
| | /G/Y][A | | /E/G/D] | | /S/A/G/ | | | | D][F/Y] | | | | | |
| | /V]S[L/ | | [V/I/L] | | N]W[Y/L | | | | [S/T]LT | | | | | |
| | V]G[E/D | | [S/-/L] | | /F]QQ[K | | | | IS[S/N] | | [H/L/Q/ | | | |
| | ][R/K/T | | [-/F/Y] | | /R]P[G/ | | | | [M/L/V] | | G]QY[H/ | | | |
| | /S][V/I | | [-/G/S] | | D][S/G/ | | | | [E/K][A | | A/Y/G/D | | | |
| | ][T/S/N | | [-/S][- | | Q/K][S/ | | | | /S/Y/F] | | ][-/R/S | | | |
| | ][M/L/I | | /N/D/I] | | T][P/I/ | | [N/D/A/ | | ED[A/F/ | | /T/Q/E] | | | |
| | ][T/S]C | | [-/Q][S | | F]K[L/R | | W/H/R][ | | L/M][A/ | | [R/S/Y/ | | FG[G/S] | |
| | [T/R/K/ | | /K/N][S | | /G/T][W | | T/A/S/G | | G][T/D/ | | F][S/Q/ | | GTKLE[I | |
| | H][A/S] | | /G/N][Y | | /L][I/V | | ][S/T/N | | V/I]Y[Y | | P][P/W/ | | /M][K/- | |
| | S | 1076 | /N] | 1142 | ]Y | 1210 | ] | 1251 | /F]C | 1317 | F/R/Y]T | 1399 | ] | 1445 |
| H5S14- | DIVMSQS | 1077 | QSLLYSS | 1143 | LAWYQQK | 1211 | WAS | 1245 | TRESGVP | 1318 | QQYYSYP | 1400 | FGGGTKL | 1427 |
| 21AL | PSSLAVS | | NQKNY | | PGQSPKL | | | | DRFTGSG | | WT | | EIK | |
| | VGEKVTM | | | | LIY | | | | SGTDFTL | | | | | |
| | SCKSS | | | | | | | | TISSVKA | | | | | |
| | | | | | | | | | EDLAVYY | | | | | |
| | | | | | | | | | C | | | | | |
| H5S14- | DIQMTQS | 1078 | QEI---- | 1144 | LSWLQQK | 1212 | AAS | 1239 | TLDSGVP | 1319 | LQYASYP | 1401 | FGSGTKL | 1428 |
| 22AL | PSSLSAS | | --SGY | | PDGTIKR | | | | KRFSGSR | | FT | | EIK | |
| | LGERVSL | | | | LIY | | | | SGSDYSL | | | | | |
| | TCRAS | | | | | | | | TISSLES | | | | | |
| | | | | | | | | | EDFADYY | | | | | |
| | | | | | | | | | C | | | | | |
| H5S14- | DIKMTQS | 1079 | QDI---- | 1145 | LSWFQQK | 1213 | RAN | 1252 | RLVDGVP | 1320 | LQYDEFP | 1402 | FGGGTKL | 1427 |
| 23AL | PSSMYAS | | --NSY | | PGKSPKT | | | | SRFSGSG | | WT | | EIK | |
| | LGERVTI | | | | LIY | | | | SGQDYSL | | | | | |
| | TCKAS | | | | | | | | TISSLEY | | | | | |
| | | | | | | | | | EDMGIYY | | | | | |
| | | | | | | | | | C | | | | | |
| H5S15- | QIVLTQS | 1080 | SSVS--- | 1108 | LHWYQQK | 1214 | DTS | 1233 | NLASGVP | 1268 | HQYHRSQ | 1403 | FGGGTKL | 1427 |
| 19AL | PAIMSAS | | --SSY | | PGSSPKL | | | | ARFSGSG | | WT | | EIK | |
| | LGERVTL | | | | WIY | | | | SGTSYSL | | | | | |
| | TCTAS | | | | | | | | TISSMEA | | | | | |
| | | | | | | | | | EDAATYY | | | | | |
| | | | | | | | | | C | | | | | |
| H5S15- | DIVMSQS | 1077 | QSLLYSS | 1143 | LAWYQQK | 1211 | WAS | 1245 | TRESGVP | 1318 | QQYYSYP | 1404 | FGGGTKL | 1427 |
| 21AL | PSSLAVS | | NQKNY | | PGQSPKL | | | | DRFTGSG | | YT | | EIK | |
| | VGEKVTM | | | | LIY | | | | SGTDFTL | | | | | |
| | SCKSS | | | | | | | | TISSVKA | | | | | |
| | | | | | | | | | EDLAVYY | | | | | |
| | | | | | | | | | C | | | | | |
| H5S15- | DIVMSQS | 1077 | QSLLYSS | 1143 | LAWYQQK | 1211 | WAS | 1245 | TRESGVP | 1318 | QQYYSYP | 1405 | FGGGTKL | 1427 |
| 26AL | PSSLAVS | | NQKNY | | PGQSPKL | | | | DRFTGSG | | RT | | EIK | |
| | VGEKVTM | | | | LIY | | | | SGTDFTL | | | | | |
| | SCKSS | | | | | | | | TISSVKA | | | | | |
| | | | | | | | | | EDLAVYY | | | | | |
| | | | | | | | | | C | | | | | |
| H5S19- | DIKMTQS | 1081 | QDI---- | 1145 | LNWFQQK | 1215 | RAN | 1252 | RLVDGVP | 1321 | LQYDEFP | 1406 | FGSGTKL | 1446 |
| 15AL | PSSMYAS | | --NSY | | PGKSPKT | | | | SRFSGSG | | FT | | EMK | |
| | LGESVTI | | | | LIY | | | | SGQDYSL | | | | | |
| | TCKAS | | | | | | | | TISSLEF | | | | | |
| | | | | | | | | | EDMGIYY | | | | | |
| | | | | | | | | | C | | | | | |
| H5S19- | DIKMTQS | 1081 | QDI---- | 1145 | LSWFQQK | 1213 | RAN | 1252 | RLVDGVP | 1321 | LQYDEFP | 1406 | FGSGTKL | 1446 |
| 9BL | PSSMYAS | | --NSY | | PGKSPKT | | | | SRFSGSG | | FT | | EMK | |
| | LGESVTI | | | | LIY | | | | SGQDYSL | | | | | |
| | TCKAS | | | | | | | | TISSLEF | | | | | |
| | | | | | | | | | EDMGIYY | | | | | |
| | | | | | | | | | C | | | | | |
| H5S20- | DIVMSQS | 1077 | QSLLYSS | 1143 | LAWYQQK | 1211 | WAS | 1245 | TRESGVP | 1318 | QQYYSYP | 1407 | FGSGTKL | 1428 |
| 12AL | PSSLAVS | | NQKNY | | PGQSPKL | | | | DRFTGSG | | FT | | EIK | |
| | VGEKVTM | | | | LIY | | | | SGTDFTL | | | | | |
| | SCKSS | | | | | | | | TISSVKA | | | | | |
| | | | | | | | | | EDLAVYY | | | | | |
| | | | | | | | | | C | | | | | |
| H5S20- | DIVMSQS | 1077 | QSLLYSS | 1143 | LAWYQQR | 1216 | WAS | 1245 | TRESGVP | 1318 | QQYYSYP | 1407 | FGSGTKL | 1428 |
| 12BL | PSSLAVS | | NQKNY | | PGQSPKL | | | | DRFTGSG | | FT | | EIK | |
| | VGEKVTM | | | | LIY | | | | SGTDFTL | | | | | |
| | SCKSS | | | | | | | | TISSVKA | | | | | |
| | | | | | | | | | EDLAVYY | | | | | |
| | | | | | | | | | C | | | | | |
| H5S20- | DIVMSQS | 1077 | QSLLYSS | 1146 | LAWYQQK | 1211 | WAS | 1245 | TRESGVP | 1318 | QQYYSYP | 1407 | FGSGTKL | 1428 |
| 1AL | PSSLAVS | | DQKNY | | PGQSPKL | | | | DRFTGSG | | FT | | EIK | |
| | VGEKVTM | | | | LIY | | | | SGTDFTL | | | | | |
| | SCKSS | | | | | | | | TISSVKA | | | | | |
| | | | | | | | | | EDLAVYY | | | | | |
| | | | | | | | | | C | | | | | |
| H5S20- | DIVMSQS | 1082 | QSLLYSS | 1146 | LAWYQQK | 1211 | WAS | 1245 | TRESGVP | 1318 | QQYYSYP | 1407 | FGSGTKL | 1428 |
| 1BL | PSSLGVS | | DQKNY | | PGQSPKL | | | | DRFTGSG | | FT | | EIK | |
| | VGEKVTM | | | | LIY | | | | SGTDFTL | | | | | |
| | SCKSS | | | | | | | | TISSVKA | | | | | |
| | | | | | | | | | EDLAVYY | | | | | |
| | | | | | | | | | C | | | | | |
| H5S20- | DIVMSQS | 1077 | QSLLYSS | 1146 | LAWYQQK | 1211 | WAS | 1245 | TGESGVP | 1322 | QQYYSYP | 1407 | FGSGTKL | 1428 |
| 27AL | PSSLAVS | | DQKNY | | PGQSPKL | | | | DRFTGSG | | FT | | EIK | |
| | VGEKVTM | | | | LIY | | | | SGTDFTL | | | | | |
| | SCKSS | | | | | | | | TISSVKA | | | | | |
| | | | | | | | | | EDLAVYY | | | | | |
| | | | | | | | | | C | | | | | |
| H5S20- | DIVMSQS | 1077 | QSLLYSS | 1146 | LAWYQQK | 1211 | WAS | 1245 | TRGSGVP | 1323 | QQYYSYP | 1407 | FGSGTKL | 1428 |
| 28AL | PSSLAVS | | DQKNY | | PGQSPKL | | | | DRFTGSG | | FT | | EIK | |
| | VGEKVTM | | | | LIY | | | | SGTDFTL | | | | | |
| | SCKSS | | | | | | | | TISSVKA | | | | | |
| | | | | | | | | | EDLAVYY | | | | | |
| | | | | | | | | | C | | | | | |
| H5S20- | DIVMSQS | 1083 | QSLLFSS | 1147 | LAWYQQK | 1211 | WAS | 1245 | TRESGVP | 1318 | QQYYSYP | 1407 | FGSGTKL | 1428 |
| 29AL | PSSLAVS | | NQKNY | | PGQSPKL | | | | DRFTGSG | | FT | | EIK | |
| | VGEKITM | | | | LIY | | | | SGTDFTL | | | | | |
| | SCKSS | | | | | | | | TISSVKA | | | | | |
| | | | | | | | | | EDLAVYY | | | | | |
| | | | | | | | | | C | | | | | |
| H5S20- | DIVMSQS | 1084 | QSLLYGS | 1148 | LAWYQQK | 1211 | WAS | 1245 | TRESGVP | 1318 | QQYYSYP | 1407 | FGSGTKL | 1428 |
| 30AL | PSSLPVS | | NQKNY | | PGQSPKL | | | | DRFTGSG | | FT | | EIK | |
| | VGEKVTM | | | | LIY | | | | SGTDFTL | | | | | |
| | TCKSS | | | | | | | | TISSVKA | | | | | |
| | | | | | | | | | EDLAVYY | | | | | |
| | | | | | | | | | C | | | | | |
| H5S20- | DIVMSQS | 1083 | QSLLFSS | 1147 | LAWYQQK | 1211 | WAS | 1245 | TRESGVP | 1318 | QQYYTYP | 1408 | FGSGTKL | 1446 |
| 33AL | PSSLAVS | | NQKNY | | PGQSPKL | | | | DRFTGSG | | FT | | EMK | |
| | VGEKITM | | | | LIY | | | | SGTDFTL | | | | | |
| | SCKSS | | | | | | | | TISSVKA | | | | | |
| | | | | | | | | | EDLAVYY | | | | | |
| | | | | | | | | | C | | | | | |
| H5S20- | DIVMSQS | 1083 | QSLLFGS | 1149 | LAWYQQK | 1211 | WAS | 1245 | TRESGVP | 1318 | QQYYTYP | 1408 | FGSGTKL | 1446 |
| 42AL | PSSLAVS | | NQKNY | | PGQSPKL | | | | DRFTGSG | | FT | | EMK | |
| | VGEKITM | | | | LIY | | | | SGTDFTL | | | | | |
| | SCKSS | | | | | | | | TISSVKA | | | | | |
| | | | | | | | | | EDLAVYY | | | | | |
| | | | | | | | | | C | | | | | |
| H5S20- | DIVMSQS | 1083 | QSLLFSS | 1150 | LAWYQQK | 1217 | WAS | 1245 | TRESGVP | 1318 | QQYYSYP | 1407 | FGSGTKL | 1428 |
| 4AL | PSSLAVS | | IQKNY | | PGQSPKL | | | | DRFTGSG | | FT | | EIK | |
| | VGEKITM | | | | LVY | | | | SGTDFTL | | | | | |
| | SCKSS | | | | | | | | TISSVKA | | | | | |
| | | | | | | | | | EDLAVYY | | | | | |
| | | | | | | | | | C | | | | | |
| H5S20- | DIVMSQS | 1077 | QSLLYSS | 1143 | LAWYQQK | 1211 | WSS | 1253 | TRESGVP | 1318 | QQYYSYP | 1407 | FGSGTKL | 1428 |
| 6AL | PSSLAVS | | NQKNY | | PGQSPKL | | | | DRFTGSG | | FT | | EIK | |
| | VGEKVTM | | | | LIY | | | | SGTDFTL | | | | | |
| | SCKSS | | | | | | | | TISSVKA | | | | | |
| | | | | | | | | | EDLAVYY | | | | | |
| | | | | | | | | | C | | | | | |
| ITI_ | QIVLTQS | 1085 | SSVS--- | 1108 | LHWYQQK | 1214 | NTS | 1254 | NLASGVP | 1324 | HQYH-RS | 1409 | FGGGTKL | 1427 |
| 12 | PAIMSAS | | --SSY | | PGSSPKL | | | | ARFSGSG | | PT | | EIK | |
| 2L | LGERVTM | | | | WIY | | | | SGTSFSL | | | | | |
| | TCTAS | | | | | | | | TISSMEA | | | | | |
| | | | | | | | | | EDAATYY | | | | | |
| | | | | | | | | | C | | | | | |
| ITI_ | DIKMTQS | 1081 | QDI---- | 1145 | LSWFQQK | 1213 | RAN | 1252 | RLVDGVP | 1325 | LQYDEFP | 1406 | FGSGTKL | 1446 |
| 173L | PSSMYAS | | --NSY | | PGKSPKT | | | | SRFSGSG | | FT | | EMK | |
| | LGESVTI | | | | LIY | | | | SGQDYSL | | | | | |
| | TCKAS | | | | | | | | TISSLEF | | | | | |
| | | | | | | | | | EDMGIYF | | | | | |
| | | | | | | | | | C | | | | | |
| ITI_ | DILMTQS | 1086 | QGI---- | 1151 | IGWLQQK | 1218 | HGT | 1255 | NLEDGVP | 1326 | GQYGQFP | 1410 | FGGGTKL | 1432 |
| 203L | PSSMSVS | | --SSN | | PGKSFKG | | | | SRFSGSG | | PT | | EI- | |
| | LGDTVNI | | | | LIY | | | | SGADYSL | | | | | |
| | TCHAS | | | | | | | | TISNLES | | | | | |
| | | | | | | | | | EDFADYY | | | | | |
| | | | | | | | | | C | | | | | |
| | | Seq. | | Seq. | | Seq. | | Seq. | | Seq. | | Seq. | | Seq. |
| | FR1 | ID | CDR1 | ID | FR2 | ID | CDR2 | ID | FR3 | ID | CDR3 | ID | FR4 ID | ID |

Consensus Cluster #1

| | | | | | | | | | NRFSGVP | | | | | |
|---|---|---|---|---|---|---|---|---|---|---|---|---|---|---|
| | | | | | | | | | DRF[S/I | | | | | |
| | | | | | | | | | ]G[S/G] | | SQS[T/I | | | |
| | DVVMTQT | | | | | | | | GSGTDFT | | ][-/H][ | | | |
| | PLSL[P/ | | | | LHWYLĄK | | | | L[K/R]I | | -/V][H/ | | | |
| | S]VSLGD | | QSLVH[S | | PGQSP[K | | | | SRVE[T/ | | P/V][V/ | | FG[S/G] | |
| | QAS[I/V | | /T]NGNT | | /R]L[L/ | | | | A]EDLGV | | P][P/W/ | | GTKLE[I | |
| | ]SCRSS | 1087 | Y | 1152 | M]IY | 1219 | KVS | 1248 | YFC | 1327 | F]T | 1411 | /V]K | 1447 |
| H5S14- | DVVMTQT | 1088 | QSLVHSN | 1153 | LHWYLĄK | 1220 | KVS | 1248 | NRFSGVP | 1328 | SQSIH-V | 1412 | FGSGTKL | 1428 |
| 10AL | PLSLPVS | | GNTY | | PGQSPKL | | | | DRFSGSG | | PFT | | EIK | |
| | LGDQASI | | | | LIY | | | | SGTDFTL | | | | | |
| | SCRSS | | | | | | | | KISRVEA | | | | | |
| | | | | | | | | | EDLGVYF | | | | | |
| | | | | | | | | | C | | | | | |
| H5S14- | DVVMTQT | 1088 | QSLVHSN | 1153 | LHWYLQK | 1220 | KVS | 1248 | NRFSGVP | 1328 | SQSTH-V | 1413 | FGSGTKL | 1428 |
| 7ALandH | PLSLPVS | | GNTY | | PGQSPKL | | | | DRFSGSG | | PFT | | EIK | |
| 5S15- | LGDQASI | | | | LIY | | | | SGTDFTL | | | | | |
| 23AL | SCRSS | | | | | | | | KISRVEA | | | | | |
| | | | | | | | | | EDLGVYF | | | | | |
| | | | | | | | | | C | | | | | |
| H5S15- | DVVMTQT | 1088 | QSLVHTN | 1154 | LHWYLQK | 1221 | KVS | 1248 | NRFSGVP | 1329 | SQST--H | 1414 | FGSGTKL | 1428 |
| 10AL | PLSLPVS | | GNTY | | PGQSPRL | | | | DRFSGGG | | VPT | | EIK | |
| | LGDQASI | | | | LIY | | | | SGTDFTL | | | | | |
| | SCRSS | | | | | | | | KISRVEA | | | | | |
| | | | | | | | | | EDLGVYF | | | | | |
| | | | | | | | | | C | | | | | |
| H5S15- | DVVMTQT | 1089 | QSLVHSN | 1153 | LHWYLQK | 1220 | KVS | 1248 | NRFSGVP | 1330 | SQST--H | 1414 | FGSGTKL | 1448 |
| 11AL | PLSLPVS | | GNTY | | PGQSPKL | | | | DRFIGSG | | VPT | | EVK | |
| | LGDQASV | | | | LIY | | | | SGTDFTL | | | | | |
| | SCRSS | | | | | | | | KISRVEA | | | | | |
| | | | | | | | | | EDLGVYF | | | | | |
| | | | | | | | | | C | | | | | |
| H5S15- | DVVMTQT | 1090 | QSLVHSN | 1153 | LHWYLQK | 1220 | KVS | 1248 | NRFSGVP | 1328 | SQST--H | 1414 | FGSGTKL | 1428 |
| 11BL | PLSLSVS | | GNTY | | PGQSPKL | | | | DRFSGSG | | VPT | | EIK | |
| | LGDQASI | | | | LIY | | | | SGTDFTL | | | | | |
| | SCRSS | | | | | | | | KISRVEA | | | | | |
| | | | | | | | | | EDLGVYF | | | | | |
| | | | | | | | | | C | | | | | |
| H5S15- | DVVMTQT | 1088 | QSLVHSN | 1153 | LHWYLQK | 1222 | KVS | 1248 | NRFSGVP | 1331 | SQST--H | 1414 | FGSGTKL | 1428 |
| 11CL | PLSLPVS | | GNTY | | PGQSPKL | | | | DRFSGSG | | VPT | | EIK | |
| | LGDQASI | | | | MIY | | | | SGTDFTL | | | | | |
| | SCRSS | | | | | | | | RISRVEA | | | | | |
| | | | | | | | | | EDLGVYF | | | | | |
| | | | | | | | | | C | | | | | |
| H5S15- | DVVMTQT | 1088 | QSLVHSN | 1153 | LHWYLQK | 1220 | KVS | 1248 | NRFSGVP | 1328 | SQST--H | 1414 | FGSGTKL | 1428 |
| 11DL | PLSLPVS | | GNTY | | PGQSPKL | | | | DRFSGSG | | VPT | | EIK | |
| | LGDQASI | | | | LIY | | | | SGTDFTL | | | | | |
| | SCRSS | | | | | | | | KISRVEA | | | | | |
| | | | | | | | | | EDLGVYF | | | | | |
| | | | | | | | | | C | | | | | |
| H5S15- | DVVMTQT | 1088 | QSLVHSN | 1153 | LHWYLQK | 1220 | KVS | 1248 | NRFSGVP | 1332 | SQST--H | 1414 | FGSGTKL | 1428 |
| 11EL | PLSLPVS | | GNTY | | PGQSPKL | | | | DRFSGSG | | VPT | | EIK | |
| | LGDQASI | | | | LIY | | | | SGTDFTL | | | | | |
| | SCRSS | | | | | | | | KISRVET | | | | | |
| | | | | | | | | | EDLGVYF | | | | | |
| | | | | | | | | | C | | | | | |
| H5S15- | DVVMTQT | 1088 | QSLVHSN | 1153 | LHWYLQK | 1220 | KVS | 1248 | NRFSGVP | 1328 | SQSTHVP | 1415 | FGGGTKL | 1427 |
| 22AL | PLSLPVS | | GNTY | | PGQSPKL | | | | DRFSGSG | | PWT | | EIK | |
| | LGDQASI | | | | LIY | | | | SGTDFTL | | | | | |
| | SCRSS | | | | | | | | KISRVEA | | | | | |
| | | | | | | | | | EDLGVYF | | | | | |
| | | | | | | | | | C | | | | | |
| | | Seq. | | Seq. | | Seq. | | Seq. | | Seq. | | Seq. | | Seq. |
| | FR1 | ID | CDR1 | ID | FR2 | ID | CDR2 | ID | FR3 | ID | CDR3 | ID | FR4 ID | ID |

Consensus Cluster #4

| | | | | | | | | | [T/N]LA | | | | | |
|---|---|---|---|---|---|---|---|---|---|---|---|---|---|---|
| | | | | | | | | | [E/D]GV | | | | | |
| | | | | | | | | | PSRFSGS | | | | | |
| | | | | | | | | | GSGT[Q/ | | | | | |
| | | | | | | | | | H][F/Y] | | QH[H/F] | | | |
| | DIQMTQS | | | | | | | | SLKIN[S | | [Y/W][- | | | |
| | PASLS[A | | [E/G]NI | | | | | | /N]LQ[P | | /G][G/T | | | |
| | /V]SVGE | | [Y/H][S | | L[A/T]W | | | | /S]E[D/ | | /S][T/P | | FG[G/S] | |
| | TVTITCR | | /N][Y/N | | YQQKQGK | | [N/A]A[ | | E]FGSYY | | /M][Y/R | | GTKLE[I | |
| | [A/P]S | 1091 | ] | 1155 | SPQLLVY | 1223 | K/T] | 1256 | C | 1333 | /F]T | 1416 | /V]K | 1449 |
| H5S14- | DIQMTQS | 1092 | ENIYSN | 1156 | LAWYQQK | 1224 | AAT | 1238 | NLADGVP | 1334 | QHFWGTP | 1417 | FGGGTKL | 1427 |
| 19AL | PASLSVS | | | | QGKSPQL | | | | SRFSGSG | | RT | | EIK | |
| | VGETVTI | | | | LVY | | | | SGTQYSL | | | | | |
| | TCRAS | | | | | | | | KINSLQS | | | | | |
| | | | | | | | | | EDFGSYY | | | | | |
| | | | | | | | | | C | | | | | |
| H5S14- | DIQMTQS | 1093 | ENIYSY | 1157 | LAWYQQK | 1224 | NAK | 1257 | TLAEGVP | 1335 | QHHYGTM | 1418 | FGGGTKL | 1427 |
| 9AL | PASLSAS | | | | QGKSPQL | | | | SRFSGSG | | YT | | EIK | |
| | VGETVTI | | | | LVY | | | | SGTQFSL | | | | | |
| | TCRAS | | | | | | | | KINSLQP | | | | | |
| | | | | | | | | | EDFGSYY | | | | | |
| | | | | | | | | | C | | | | | |
| H5S15- | DIQMTQS | 1093 | ENIYSY | 1157 | LAWYQQK | 1224 | NAK | 12577 | TLAEGVP | 1335 | QHHY-GT | 1419 | FGGGTKL | 1427 |
| 2AL | PASLSAS | | | | QGKSPQL | | | | SRFSGSG | | YT | | EIK | |
| | VGETVTI | | | | LVY | | | | SGTQFSL | | | | | |
| | TCRAS | | | | | | | | KINSLQP | | | | | |
| | | | | | | | | | EDFGSYY | | | | | |
| | | | | | | | | | C | | | | | |
| H5S15- | DIQMTQS | 1093 | GNIHNY | 1158 | LAWYQQK | 1224 | NAK | 1257 | TLADGVP | 1336 | QHFW-ST | 1420 | FGSGTKL | 1428 |
| 32AL | PASLSAS | | | | QGKSPQL | | | | SRFSGSG | | FT | | EIK | |
| | VGETVTI | | | | LVY | | | | SGTQYSL | | | | | |
| | TCRAS | | | | | | | | KINSLQP | | | | | |
| | | | | | | | | | EDFGSYY | | | | | |
| | | | | | | | | | C | | | | | |
| ITI_ | DIQMTQS | 1093 | GNIHNY | 1158 | LTWYQQK | 1225 | NAK | 1257 | TLADGVP | 1337 | QHFW-ST | 1420 | FGSGTKL | 1448 |
| 02 | PASLSAS | | | | QGKSPQL | | | | SRFSGSG | | FT | | EVK | |
| 3L | VGETVTI | | | | LVY | | | | SGTQYSL | | | | | |
| | TCRAS | | | | | | | | KINNLQP | | | | | |
| | | | | | | | | | EDFGSYY | | | | | |
| | | | | | | | | | C | | | | | |
| ITI_ | DIQMTQS | 1094 | ENIYSY | 1157 | LAWYQQK | 1224 | NAK | 1257 | TLAEGVP | 1338 | QHHYGTP | 1421 | FGGGTKL | 1427 |
| 24 | PASLSAS | | | | QGKSPQL | | | | SRFSGSG | | YT | | EIK | |
| 0L | VGETVTI | | | | LVY | | | | SGTHFSL | | | | | |
| | TCRPS | | | | | | | | KINSLQP | | | | | |
| | | | | | | | | | EEFGSYY | | | | | |
| | | | | | | | | | C | | | | | |
| | | Seq. | | Seq. | | Seq. | | Seq. | | Seq. | | Seq. | | Seq. |
| | FR1 | ID | CDR1 | ID | FR2 | ID | CDR2 | ID | FR3 | ID | CDR3 | ID | FR4 ID | ID |

Consensus Cluster #2

| | | | | | | | | | [N/T][L | | | | | |
|---|---|---|---|---|---|---|---|---|---|---|---|---|---|---|
| | | | | | | | | | /R][A/R | | | | | |
| | [D/E][I | | | | | | | | /F][S/P | | | | | |
| | /T/A][V | | | | | | | | ]GV[P/L | | | | | |
| | /T][M/V | | | | | | | | ][D/S]R | | | | | |
| | ]TQ[A/S | | | | | | | | FS[S/G] | | | | | |
| | /T][A/P | | | | | | | | SG[S/Y] | | | | | |
| | ][F/A/L | | | | | | | | GTDF[T/ | | | | | |
| | ]S[N/L] | | [K/T/Q] | | | | | | V][L/F] | | | | | |
| | [P/S/T] | | [S/D/T] | | | | | | [R/T/K] | | | | | |
| | V[T/A/S | | [L/I][L | | | | | | I[S/E][ | | | | | |
| | ][L/T]G | | /-/E][H | | [L/M][Y | | | | R/N][V/ | | | | | |
| | [T/E/D] | | /-/N][S | | /N]WY[L | | | | T][E/L] | | [A/L]Q[ | | | |
| | [S/K/Q] | | /-/T][N | | /Q]QKPG | | | | [A/S]ED | | N/S/V][ | | | |
| | [A/V][S | | /-][G/- | | [Q/E][S | | | | [V/L][G | | L/D/T][ | | | |
| | /T]I[S/ | | ][I/D/N | | /P]P[Q/ | | [Q/E/R] | | /A][V/ | | E/N/H][ | | | |
| | R]C[R/I | | ][T/D][ | | K]LLI[Y | | [M/G/V] | | D]Y[Y/F] | | L/M/V]P | | FGGGTKL | |
| | ][S/T]S | 1095 | Y/D] | 1159 | /S] | 1226 | [S/N] | 1258 | C | 1339 | YT | 1422 | EIK | 1427 |
| H5S14- | ETTVTQS | 1096 | TDI---- | 1160 | MNWYQQK | 1227 | EGN | 1259 | TLRPGVP | 1340 | LQSDNMP | 1423 | FGGGTKL | 1427 |
| 12AL | PASLSVA | | -DDD | | PGEPPKL | | | | SRFSSSG | | YT | | EIK | |
| | TGEKVTI | | | | LIS | | | | YGTDFVF | | | | | |
| | RCITS | | | | | | | | TIENTLS | | | | | |
| | | | | | | | | | EDVADYY | | | | | |
| | | | | | | | | | C | | | | | |
| H5S19- | DAVMTQT | 1097 | QTLENTN | 1161 | LNWYLQK | 1228 | RVS | 1260 | NRFSGVL | 1341 | LQVTHVP | 1424 | FGGGTKL | 1427 |
| 22AL | PLSLTVS | | GNTY | | PGQSPQL | | | | DRFSGSG | | YT | | EIK | |
| | LGDQASI | | | | LIY | | | | SGTDFTL | | | | | |
| | SCRSS | | | | | | | | KISRVEA | | | | | |
| | | | | | | | | | EDLGVYF | | | | | |
| | | | | | | | | | C | | | | | |
| H5S19- | DIVMTQA | 1098 | KSLLHSN | 1162 | LYWYLĄK | 1229 | QMS | 1261 | NLASGVP | 1342 | AQNLELP | 1425 | FGGGTKL | 1427 |
| 24AL | AFSNPVT | | GITY | | PGQSPQL | | | | DRESSSG | | YT | | EIK | |
| | LGTSASI | | | | LIY | | | | SGTDFTL | | | | | |
| | SCRSS | | | | | | | | RISRVEA | | | | | |
| | | | | | | | | | EDVGVYY | | | | | |
| | | | | | | | | | C | | | | | |

TABLE 3

| Seq. Name | Sequence | Seq. ID |
|---|---|---|
| H5S14-12AH | QVQLQQSGAELVRPGTSVKISCKASGNIFTNSWLGWIKQRPGHGLEWIGDVYPGGGYNKYNEKFKGKATLTIDTSASTAYMQ | 1 |
| | LSRLTSEDSGVYFCAGAMDYWGQGTSVTVSS | |
| H5S14-13AH | QVQLQQSGAELVRPGTSVKISCKASGYIFTNSWLGWIKQRPGHGLEWIGDVYPGGGYNKYNEKFKGKATLTIDTSASTAYMQ | 2 |
| | LSRLTSEDSAVYFCAGAMDYWGQGTSVTVSS | |
| H5S14-14AH | QVQLQQSGAELVRPGTSVKISCKASGYIFTNYWLGWIKQRPGHGLEWIGDVYPGGGYNKYNEKFKGKATLTVDTSASTAYM | 3 |
| | QLSRLTSEDSAVYFCAGAMDYWGQGTSVTVSS | |
| H5S14-19AH | QVQLQQSGAELVRPGTSVKISCKASGYTFTNSWLGWVKQRPGHGLEWIGDIYPGGGYNKYNEKFKGKATLTADTSSSTAYM | 4 |
| | QLSSLTSEDSAVYFCAGAMDSWGQGTSVTVSS | |
| H5S15-31AH | QVQLQQSGAELVRPGTSVKISCKASGYAFTNSWLGWVKQRPGHGLEWIGDIYPGGGYNKYNEKFKGKATLTADTSSSTAYM | 5 |
| | QLSSLTSEDSAVYFCAGALDYWGQGTSVTVSS | |
| H5S15-35AH | QVQLQQSGAELVRPGTSVKISCKASGYTFTNSWLGWVKQRPGHGLEWIGDIYPGGGYNKYNEKFKGKATLTADTSSSTAYM | 6 |
| | QLGSLTSEDSAVYFCAGAMDYWGQGTSVTVSS | |
| H5S20-23AH | QVQLQQSGAELVRPGTSVKISCKASGYTLINSWLGWVKQRPGHGLEWIGDIYPGGGYNKYNEKFKGKAILTADTSSSTAYMQ | 7 |
| | LSSLTSEDSAVYFCAGAMDYWGQGTSVTVSS | |
| H5S20-24AH | QVQLQQSGAELVRPGTSVKISCKASGYTFTNYWLGWVKQRPGHGLEWIGDIYPGGGYIIYNEKFKGKATLTVDSSATTAYIQL | 8 |
| | NSLTSEDSAVYFCAGAMDHWGQGTSVTVSS | |
| H5S20-28AH | QVQLQQSGAEVVRPGTSVQISCKASGFTLTNYWLGWVKQRPGHGLEWIGDIYPGGGYTNYNEKFKGKATLTADTSSNTAYM | 9 |
| | QLSGLTSEDSAVYFCAGAMDKWGQGTSVTVSS | |
| H5S20-28BH | QVQLQQSGAEVVRPGTSVKISCKASGFTLTNYWLGWVKQRPGHGLEWIGDIYPGGGYTNYNEKFKGKATLTADTSSNTAYM | 10 |
| | QLSGLTSEDSAVYFCAGAMDKWGQGTSVTVSS | |
| H5S20-30AH | QVQLQQSGTEVVRPGTSVKISCKASGFTLTNYWLGWVKQRPGHGLEWIGDIYPGGGYANYNEKFKGKATLTADTSSNTAYM | 11 |
| | QLSGLTSEDSAVYFCAGAMDKWGQGTSVTVSS | |
| H5S20-32AH | QVQLQQSGAELVRPGTSVKISCKASGYTFTNYWLGWVKQWPGHGLEWIGDIYPGGGYNIYNEKFKGKATLTVDTSSSTAYM | 12 |
| | QLSSLTSEDSAVYFCAGAMDYWGQGTSVTVSS | |
| H5S20-32BH | QVQLQQSGAELVRPGTSVKISCKASGYTFTNYWLGWVKQRPGHGLEWIGDIYPGGGYNIYNEKFKGKATLTVDTSSSTAYM | 13 |
| | QLSSLTSEDSAVYFCAGAMDYWGQGTSVTVSS | |
| H5S20-32CH | QVQLQQSGAELVRPGTSVKISCKASGYTFTNYWLGWVKQRPGHGLEWIGDIYPGGGYNIYNEKFKGKATLTIDTSSSTAYMQ | 14 |
| | LSSLTSEDSAVYFCAGAMDYWGQGTSVTVSS | |
| H5S20-33AH | QVQLQQSGAELVRPGTSVRISCKASGYTLTNSWLGWVKQRPGHGLEWIGDIYPGGGYTKYNENFKGKATLTADTSSSTAYM | 15 |
| | QLSRLTSEDSGVYFCVGAVAYWGQGTSVTVSS | |
| H5S20-35AH | QVQLQQSGAELVRPGTSVKISCKASGYTFTNYWLGWVKQRPGHGLEWIGDIYPGGGYNKYNEKFKGKATLTADTSSSTAYM | 16 |
| | QLSSLTSEDSAVYFCAGAMDYWGQGTSVTVSS | |
| H5S20-36AH | QVQLQQSGAELVRPGTSVKMSCKASGYTFTNSWLGWVKQRPGHGLEWIGDIYPGGGYIKYNEKFKGKATLTADTSSSTAYM | 17 |
| | QLSSLTSEDSAVYFCAGAMDYWGQGTSVTVSS | |
| H5S20-38AH | QVQLQQSGAELVRPGTSVRISCKASGYTLTNSWLGWVKQRPGHGLEWIGDIYPGGGYTKYNEKFKGKATLTADTSSSTAYM | 18 |
| | QLSSLTSEDSAVYFCAGAVAYWGQGTSVTVSS | |
| H5S20-3BH | QVQLQQSGAELVRPGTSVKISCKASGYTFTNSWLGWVKQRPGHGLEWIGDIYPGGGYNKYNEKFRGKATLTADTSSSTAYM | 19 |
| | QLSSLTSEDSAVYFCAGAMDYWGQGTSVTVSS | |
| H5S20-3CH | QVQLQQSGAELVRPGTSVKISCKASGYTFTNSWLGWVKQRPGHGLEWIGDIYPGGGYNKYNEKFKGKATLTADTSSSTAYM | 20 |
| | QLSSLTSEDSAVYFCAGAMDYWGQGTSVTVSS | |
| H5S20-41AH | QVQLQQSGAELVRPGTSVKISCKASGYRFTNYWLGWVKQRPGHGLEWIGDIYPGGGYNKYNEKFKGKATLTADTSSSTAYM | 21 |
| | QLSSLTSEDSAVYFCAGAMDYWGQGTSVTVSS | |
| H5S20-41BH | QVQLQQSGAELVRPGTSVKISCKASGYRFTNYWLGWIKQRPGHGLEWIGDIYPGGGYNKYNEKFKGKATLTADTSSSTAYM | 22 |
| | QLSSLTSEDSAVYFCAGAMDYWGQGTSVIVSS | |
| H5S20-43AH | QVQLQQSGAELVRPGTSVMISCKASGYTFTNYWLGWVKQRPGHGLEWIGDIYPGGGYIIYNEKFKGKATLTVDSSATTAYMQ | 23 |
| | LSSLTSEDSAVYFCAGAMDYWGQGTSVTVSS | |
| H5S20-48AH | QVQLQQSGAELVRPGTSVRISCKASGYTLTNSWLGWVKQRPGHGLEWIGDIYPGGGYNKYNEKFKGKATLTADTSSSTAYM | 24 |
| | QLSSLTSEDSAVYFCAGAVAYWGQGTSVTVSS | |
| H5S20-50AH | QVQLQQSGAELVRPGTSVKISCKASGYRFTNSWLGWVKQRPGHGLEWIGDIYPGGGYNKYNEKFKGKATLTADTSSNTAYM | 25 |
| | QLSSLTSEDSAVYFCAGALDYWGQGTSVTVSS | |
| H5S20-54AH | QVQLQQSGAEVVRPGTSVKISCKASGFTLTNYWLGWVKQRPGHGLEWIGDIYPGGGYTNYNEKFKGKATLTADTSSNTAYM | 26 |
| | QLSGLTSEDSAVYFCAGAMDNWGQGTSVTVSS | |
| H5S20-57AH | QVQLQQSGAELVRPGTSVKISCKASGYTFTNSWLGWVKQRPGHGLEWIGDIYPGGGYNKYNEKFKGKATLTADTSSSTAYM | 27 |
| | QLSSLTSEDSAVYFCIGAMDYWGQGTSVTVSS | |
| H5S20-60AH | QVQLQQSGAELVRPGTSVRISCKASGYTLTNSWLGWVKQRPGHGLEWIGDIYPGGGYTKYNENFKGKATLSADTSSSTAYM | 28 |
| | QLSSLTSGDSAVYFCAGAMAYWGQGTSVTVSS | |
| H5S20-62AH | QVQLQQSGAELVRPGTSVKISCKASGYSFTNYWLGWVKQRPGHGLEWIGDIYPGGGYNMYNEKFKGKATLTVDTSSSTAYM | 29 |
| | QLSSLTSEDSAVYFCAGAMDYWGQGTSVTVSS | |
| H5S20-7AH | QVQLQQSGAELVRPGTSVKISCKASGYRFTNSWLGWIKQRPGHGLEWIGDIYPGGGYNKYNEKFRGKATLTADTSSSTAYM | 30 |
| | QLSSLTSEDSAVYFCAGAMDSWGQGTSVTVSS | |
| H5S20-7BH | QVQLQQSGAELIRPGTSVKISCKASGYRFTNSWLGWIKLRPGHGLEWIGDIYPGGGYNKYNEKFRGKATLTADTSSSTAYMQ | 31 |
| | LSSLTSEDSAVYFCAGAMDSWGQGTSVTVSS | |
| ITI_047H | QVQLQQSGAELVRPGTSVKISCKASGYTFTNSWLGWVKQRPGHGLEWIGDIYPGGGYNKYNEKFKGKATLTADTSSSTAYM | 32 |
| | QLSSLTSEDSGVYFCAGAMDYWGQGTAVTVSS | |
| ITI_053H | QVQLQQSGAELVRPGTSVKISCKASGYAFTNSWLGWVRQRPGHGLEWIGDIYPGGGYNKYNEKFKGKATLTADTSSSTAYM | 33 |
| | QLSSLTSEDSAVYFCAGALDYWGQGTSVTVSS | |
| H5S14-11AH | EVKLVESGGGLVKPGGSLRLSCAASGFTFSSFAMSWIRQTPEKGLEWVASITTGGSSYSPDSLKGRFTISRDNVRNIVYLQMS | 34 |
| | SLRSEDTAMYACARGGGGNYFWFAYWGQGTLVTVSA | |
| H5S14-8AH | EVKLVESGGDLVKPGGSLKLSCAASGFTFSNYAMSWVRQTPEKRLEWVASISTGGTTSYYSDSVKGRFTISRDNARNILYLQ | 35 |
| | MSSLRSEDTAMYYCARGGGGNYFWFTYWGQGTLVTISA | |
| H5S15-10AH | DVQLVESGGGLVQPGGSRKLSCAASGFTFSSFGMHWIRQAPEKGLEWVASISSGSSTIYFADTVKGRFTISRDNPKNTLFLQ | 36 |
| | MTSLRSEDTAMYYCARGAYGNFAWFPYWGQGTLVTVSA | |
| H5S15-16AH | DVQLVESGGGLVQPGGSRKLSCAASGFTFSSFGMHWVRQAPEKGLEWVAHISSGSSTIYYADTVKGRFTISRDNPKNTLFLQ | 37 |
| | MTSLRSEDTAMYYCARGAYGNFAWFPYWGQGTLVTVSA | |
| H5S15-16BH | DVQLVESGGGLVQPGGSRKLSCAASGFTFSSFGMHWVRQAPEKGLEWVAHISSGSSTIYYADTVKGRFTISRDNPKNTLFLQ | 38 |
| | MTSLRSEDTAMYYCARGAYGNFAWFPYWGQGTLVTVST | |
| H5S15-20AH | DVQLVESGGGLVQPGGSRKLSCAASGFTFSSFGMHWVRQAPEKGLEWVASISSGSSTIYYADTVKGRFTISRDNPKNTLFLQ | 39 |
| | MTSLRSEDTAMYYCARGAYGNFAWFAFWGQGTLVTVSA | |
| H5S15-9AH | DVQLVESGGGLVQPGGSRKLSCAASGFTFSDFGMHWVRQAPEKGLEWVAHISSGSSTIYYADTVKGRFTISRDNPKNTLFLQ | 40 |
| | MTSLRSEDTAMYYCARGAYGNFAWFPYWGQGTLVTVSA | |
| H5S20-11AH | EVKLVESGGGLVKPGGSLKLSCAASGFTFSSYAMSWVRQTPETRLEWVASISSGGNTFYPDSVKGRFTISRDNVRDILYLQM | 41 |
| | SSLRSEDTAMYFCTRGGYGSSYVIWGQGTTVTVSS | |
| H5S20-11BH | EVKLVESGGGLVKPGGSLKLSCAASGFTFSSYAMSWVRQTPETRLEWVASISSGGNTFYPDSVKGRFTISRDNVRDILYLQM | 42 |
| | SSLRSEDTAMYFCTRGGYGSSYVIWGQGTTLTVSS | |
| H5S20-11CH | EVKLVESGGGLVKPGGSLKLSCAASGFTFSSYAMSWVRQTPETRLEWVASISSGGNTFYPDSVKGRFTISRDDVRDILYLQM | 43 |
| | SSLRSEDTAMYFCTRGGYGSSYVIWGQGTTLTVSS | |
| H5S20-14AH | EVKLVESGGGLVKPGGSLKLSCAASGFTFSSYAMSWVRQTPETRLEWVASISSGGNTYYPDSVKGRFTISRDNVRNILYLQM | 44 |
| | SSLRSEDTAMYFCTRGGYGSSYVIWGQGTTLTVSS | |
| H5S20-14BH | EVKLVESGGGLVKPGGSLKLSCAASGFTFSSYAMSWVRQTPETRLEWVASISSGGNTYYPDSVKGRFTISRDDVRNILYLQM | 45 |
| | SSLRSEDTAMYFCTRGGYGSSYVIWGQGTTLTVSS | |
| H5S20-14CH | EVKLVESGGGLVKPGGSLKLSCAASGFTFSSYAMSWVRQTPETRLEWVASISSGGNTYYPDSVKGRFTISRDNVRDILYLQM | 46 |
| | SSLKSEDTAMYFCTRGGYGSSYVIWGQGTTLTVSS | |
| H5S20-14DH | EVKLVESGGGLVMPGGSLKLSCAASGFTFSSYAMSWVRQTPETRLEWVASISSGGNTYYPDSVKGRFTISRDNVRNILYLQM | 47 |
| | SSLRSEDTAMYFCTRGGYGSSYVIWGQGTTLTVSS | |
| H5S20-1AH | EVKLVESGGGLVKPGGSLKLSCAASGFTFSSYAMSWVRQTPETRLEWVASISSGGDTFYRDSVKARFTISRDDVRDILYLQM | 48 |
| | SSLRSEDTAMYFCTRGGYGSSFVIWGQGTTLTVSS | |
| H5S20-29AH | EVKLVESGGGLVKPGGSLKLSCAASGFTFSSYAMSWVRQTPETRLEWVASISSGGNTFYPDSVKGRFTISRDDVRDILYLQM | 49 |
| | SSLRSEDTAMYFCTRGGYGSSFVIWGQGTTLTVSS | |
| H5S20-37AH | EVKLVESGGGLVKPGGSLKLSCAASGFTFSSYAMSWVRQTPETRLEWVASISSGGKTFYPDSVKGRFTISRDNVRDILYLQM | 50 |
| | SSLRSEDTAMYFCTRGGYGSSYVIWGQGTTLTVSS | |
| H5S20-39AH | EVKLVESGGGLVKPGGSLKLSCAASGFTFSSYAMSWVRQTPETRLEWVASISSGGNTYYPDSVKGRFTISRDNVRNILYLQM | 51 |
| | SSLRSEDTAMYFCTRGGYGSSHVIWGQGTTLTVSS | |
| H5S20-40AH | EVKLVESGGGLVKPGGSLKLSCAASGFTFSNYAMSWVRQTPETRLEWVASISSGGNTYYPDSVKGRFTISRDNVRNILYLQM | 52 |
| | SSLRSEDTAMYFCTRGGYGSSYVIWGQGTTLTVSS | |
| H5S20-4AH | EVKLVESGGGLMKPGGSLKLSCAASGFTFSSYAMSWVRQTPETRLEWVASISSGGSTYYPDSVKGRFTISRDNVRNILYLQM | 53 |
| | SSLRSEDTAMYFCTRGGYGSSYVIWGQGTTLTVSS | |
| H5S20-4BH | EVKLVESGGGLVKPGGSLKLSCAASGFTFSSYAMSWVRQTPETRLEWVASISSGGSTYYPDSVKGRFTISRDNVRNILYLQM | 54 |
| | SSLRSEDTAMYFCTRGGYGSSYVIWGQGTTLTVSS | |
| H5S20-61AH | EVKLVESGGGLVKPGGSLKLSCAASGFTFSSYAMSWVRQTPETRLEWVASISSGGSTYYPDSVKGRFTISRDNVRNILYLQM | 55 |
| | SSLRSEDTAMYFCTRGGYGSSHVIWGQGTTLTVSS | |
| H5S20-6AH | EVKLVESGGGLVKPGGSLKLSCAASGFTFSSFAMSWVRQTPEKRLEWVASISSGGNTYYPDNVKGRFTISRDNAGNILYLQM | 56 |
| | SSLRSEDTAMYYCARGGYGSSYVIWGQGTTLTVSS | |
| H5S19-12BH | QVQLKESGPGLVAPSRSLSITCTVSGFSLTTYGVHWVRQPPGKGLEWLGVIWAGGITNYNSALMSRLTISNDNSRSQVFLKM | 57 |
| | NSLQTDDTAMYYCARDWERDSSGPFPYWGQGTLVTVSA | |
| H5S19-12CH | QVQLKESGPGLVAPSRSLSITCTVSGFSLTTYGVHWVRQPPGKGLEWLGVIWAGGITNYNSALMSRLSISNDNSRSQVFLKM | 58 |
| | NSLQTDDTAMYYCARDWERDSSGPFPYWGQGTLVTVSA | |
| H5S19-14AH | QVQLKESGPGLVAPSQSLSITCTVSGFSLTSYGVHWVRQPPGKGLEWLGVIWAGGITNYNSALMSRLSISNDNSRSQVFLKM | 59 |
| | NSLQTDDTAMYYCARDWERDSSGPFAYWGQGTLVTVSA | |
| H5S19-14BH | QVQLKESGPGLVAPSQSLSITCTVSGFSLTSYGVHWVRQPPGKGLEWLGVIWAGGITNYNSALMSRLSINNDNSRSQVFLKM | 60 |
| | NSLQTDDTAMYYCARDWERDSSGPFAYWGQGTLVTVSA | |
| H5S19-17AH | QVQLKESGPGLVAPSQSLSITCTVSGFSLTTYGVHWVRQPPGKGLEWLGVIWAGGITNYNSALMSRLSISKDNSKSQVFLKM | 61 |
| | NSLQTGDTAMYYCARDWERDSSGPFAYWGQGTLVTVSA | |
| H5S19-18AH | QVQLKESGPGLVAPSQSLSITCTVSGFSLTIYGVHWRQPPGKGLEWLGVIWAGGIINYNSALMSRLSISKDNSKSQVFLKMN | 62 |
| | SLQSDDTAMYYCARDWERDSSGPFAYWGQGTLVTVSA | |
| H5S19-20AH | QVQLKESGPGLVAPSQSLSITCTVSGFSLTSYGVHWVRQPPGKGLEWLGVIWAGGITNYNSALMSRLSISKDNSKSQVFLKM | 63 |
| | NSLQTDDTAMYYCARDWERDSSGPFVYWGQGTLVTVSA | |
| H5S19-20BH | QVQLKESGPGLVAPSQSLSITCTVSGFSLTSYGVHWVRQPAGKGLEWLGVIWAGGITNYNSALMSRLSIIQDNSKSQVFLKM | 64 |
| | NSLQTDDTAMYYCARDWERDSSGPFVYWGQGTLVTVSA | |
| H5S19-20CH | QVQLKESGPVLVAPSQSLSITCTVSGFSLTSYGVHWVRQPPGKGLEWLGVIWAGGITNYNSALMSRLSISKDNSKSQVFLKM | 65 |
| | NSLQTDDTAMYYCARDWERDSSGPFVYWGQGTLVTVSA | |
| H5S19-21AH | QVQLKESGPGLVAPSQSLSITCTVSGFSLTSYGVHWVRQPPGKGLEWLGVIWAGGITNYNSALMSRLSISTDNSRSQVFLKM | 66 |
| | NSLQTDDTAMYYCARDWERDSSGPFPYWGQGTLVTVSA | |
| H5S19-22AH | QVQLKESGPGLVAPSQSLSITCTVSGFSLTNYGVHWLRQPPGKGLEWLGVIWAGGITNYNSALMSRLSISNDNSRSQVFLKM | 67 |
| | NSLQTDDTAMYYCARDWERDSSGPFAYWGQGTLVTVSA | |
| H5S19-26AH | QVQLKESGPGLVAPSQSLSITCTVSGFSLTTYGVYWVRQPPGKGLEWLGVIWAGGITNYNSALMSRLSISKDNSKSQVFLKM | 68 |
| | NSLQTGDTAMYYCARDWERDSSGPFAYWGQGTLVTVSA | |
| H5S19-27AH | QVQLKESGPGLVAPSQSLSITCTVSGFSLTSYGVHWVRQPPGKGLEWLGVIWAGGITSYNSALMSRLSISSDNSRSQVFLKM | 69 |
| | NSLQTDDTAMYYCARDWERDSSGPFPYWGQGTLVTVSA | |
| ITI_144H | QVQLKESGPGLVAPSQNLSITCTVSGFSLTTYGVHWVRQPPGKGLEWLGVIWAGGITNYNSALMSRLSISKDNFKSQVFLKM | 70 |
| | NSLQTDDTAIYYCARDWERDSSGPFPYWGQGTLVTVSA | |
| ITI_145H | QVQLKESGPGLVAPSQNLSITCTVSGFSLSTYGVHWVRQPPGKGLEWLGVIWAGGITNYNSALMSRLSISKDNFKSQVFLKM | 71 |
| | NSLQTDDTAIYYCARDWERDSSGPFPYWGQGTLVTVSA | |
| ITI_146H | QVQLKESGPGLVAPSQSLSITCTVSGFSLTTYGVHWVRQPPGKGLEWLGVIWAGGITNYNSALMSRLNISKDNSKSQVFLKM | 72 |
| | NSLQSDDTAMYYCARDWERDSSGPFAYWGQGTLVTVSA | |
| ITI_162H | QVQLKESGPGLVAPSQSLSITCTVSGFSLTSYGVHWVRQPPGKGLEWLGVIWAGGITNYNSALMSRLSINIDNSKSQVFLKM | 73 |
| | NSLQTDDTAMYYCARDWERDSSGPFPYWGQGTLVTVSA | |
| ITI_164H | GAAEGVRRPGLVAPSQSLSITCTVSGFSLTTYGVHWRQPPGKGLEWLGVIWAGGITNYNSALMSRLNINKDNSKSQVFLKM | 74 |
| | NSLQTGDTAMYYCARDWERDSSGPFAYWGQGTLVTVSA | |
| ITI_165H | QVQLKESGPGLVAPSQSLSITCTVSGFSLTSYGVHWVRQPPGKGLEWLGVIWAGGITNYNSALMSRLSITKDNSKSQVFLKM | 75 |
| | NSLQTDDTAMYYCARDWERDSSGPFAYWGQGTLVTVSA | |
| ITI_168H | QVQLKESGPGLVAPSQSLSITCTVSGFSLTTYGVHWVRQPPGKGLEWLGVIWAGGITNYNSALMSRLNINKDNSKSQVFLKM | 76 |
| | NSLQTGDTAMYYCARDWERDSSGPFAYWGQGTLVTVSA | |
| H5S14-15AH | QVQLKQSGPGLVQPSQSLSITCTVSGFSLTSYGVHWVRQSPGKGLEWLGVIWSGGSTDYNAAFICRLSISKDSSKSQVFFKM | 77 |
| | NSLQADDTAMYYCARNLGGSWVDYWGQGTSVTVSS | |
| H5S14-17AH | QVQLQQSGAELVRPGTSVKMSCKAAGYTFTNYWIGWVKQRPGHGLEWIGDIYPGGGYTNYNEKFKGKATLTADTSSSTAYM | 78 |
| | QLSSLTSEDSAIYYCARNGNSLDYWGQGTTLTVSS | |
| H5S14-25AH | QVQLQQSGAELVKPGASVKMSCKAFGYTFTTYPIEWMKQNHGKSLEWIGNFHPYNDDTKYNEKFKGKAKLTVEKSSSTVYL | 79 |
| | ELSRLTSDDSAVYYCARRLYGGAMDYWGQGTSVTVSS | |
| H5S14-6AH | EVKLVESGGGLVQPGGSLRLSCATSGFTFTDYYMSWVRQTPGKALEWLGFIRNQANAYTTEYSVSVKGRFTISRDNSQSILY | 80 |
| | LQMNTLRVEDSATYYCARVPDYWGQGTTLTVSS | |
| H5S15-12AH | EVQLQQSGAELVKPGASVKLSCTASGFNIKDTYMHWVKQRPEQGLEWIGRIDPANGNTKFDPKFQGKATITADTSSNTAYLQ | 81 |
| | LSSLTSEDTAVYYCASRGGSSFDYWGQGTTLTVSS | |
| H5S15-30AH | QVQLQQPGAELVKPGAPVKLSCKASGYTFTSYWMNWVKQRPGRGLEWIGRIDPSDSETHYNQKFKDKATLTVDKSSSTAYI | 82 |
| | QLSSLTSEDSAVYYCAREYYGNHFDYWGQGTTLTVSS | |
| H5S15-38AH | EVQLQQSGPELVKPGASVKMSCKASGYTFTSYVMHWVKQKPGQGLEWIGYINPYNDGTKYNEKFKGKATLTSDKSSSTAYM | 83 |
| | ELSSLTSEDSAVYYCARMYDYWGQGTTLTVSS | |
| H5S19-11AH | DVQLQESGPGLVNPSQSLSLTCTVTGYSITSDYAWNWIRQFPGNKLEWMGYISYSGNTGYNPSLKSRISITRDTSKNQFFLQL | 84 |
| | NSVTSEDTATYYCARWGLRIDYWGQGTTLTVSS | |
| H5S19-25AH | QVQLQQSGAELMKPGASVKISCKATGYTFSSYWIEWVKQRPGHGLEWIGEILPGSGSTNYNEKFKGKATFTADTSSNTAYM | 85 |
| | QLSSLTSEDSAVYYCARYPRWGKIDYWGQGTTLTVSS | |
| H5S19-6AH | EVQLVESGGGLVKPGGSLKLSCAASGFTFNIYTMSWVRQSPEMRLEWVAEISSGGSHTYYPDTVTGRFTISRDNAKNTLYLE | 86 |
| | MSSLRSEDTAIYYCARGGSLFDYWGQGTTLTVSS | |
| H5S20-15AH | EVQLQQSGAELVKPGASVKLSCTASGFNIKDTYMHWVKQRPEQGLEWIGRIDPANGNTKYDPKFQGKATITADTSSNTAYLQ | 87 |
| | LSSLTSEDTAVYYCATSGGSSYDYWGQGTTLTVSS | |
| H5S20-25AH | EVQLQQSGAELVKPGASVKLSCTASGFNIKDTYMHWVKQRPEQGLEWIGRIDPANGNTKYDPKFQGKATITADTSSNTAYLQ | 88 |
| | LSSLTSEDTAVYYCARSGGSSYDYWGQGTTLTVSS | |
| H5S20-34AH | EVQLQQSGAELVKPGASVKLSCTASGFNIKDTYMHWVKQRPEQGLEWIGRIDPANGNTKYDPKFQGKATITADTSSNTAYLQ | 89 |
| | LSSLTSEDTAVYYCASSGGSSFDYWGQGTTLTVSS | |
| H5S20-42AH | EVQLQQSGAELVKPGASVKLSCTASGFNIKDTYMHWVKQRPEQGLEWIGRIDPANGNTKYDPKFQGKATITADTSSNTAYLQ | 90 |
| | LSSLTSEDTAVYYCAGSGGSSYDYWGQGTTLTVSS | |
| H5S20-8AH | EVQLQQSGAELVKPGASVKLSCTASGFNIKDTYMHWVKQRPEQGLEWIGRIDPANGNTKYDPKFQGKATITADTSSNTAYLQ | 91 |
| | LSSLTSEDTAVYYCAISGGSSYDYWGQGTTLTVSS | |
| ITI_021H | DVQLQESGPGLVKPSQSLSLTCTVTGYSITSDYAWNWVRQFPGNKLEWVGYISYSGSTSYNPSLKSRISITRDTSKNQFFLQL | 92 |
| | NSVTTEDTATYYCARCYYGGRWDYWGQGTTLTVSS | |
| ITI_173H | DVQLQESGPGLVNPSQSLSLTCTVTGYSITSDYAWNWIRQFPGNKLEWMGYINYSGNTGYNPSLKSRISITRDTSKNQFFLQL | 93 |
| | NSVTSEDTATYYCARWGLRIDYWGQGTTLTVSS | |
| ITI_200H | EVQLQQSGAELVKPGASVKLSCTASGFNIKDTYIHWVKQRPEQGLEWIGRIDPANGNIKYDPKFQGKATIMADTSSNTAYLQL | 94 |
| | SSLTSEDTAVYYCAQGGGGAMDYWGQGTSVTVSS | |
| H5S15-11AH | EVQLQQSGADLVKPGASVKLSCTASGFNIKDTYMHWVKQRPEQGLEWIGRIAPANGRTKYDPKFQGKATITADTSSNTAYLQ | 95 |
| | LSSLTSEDTAVYYCANYYASSYDWFAYWGQGTLVTVSA | |
| H5S15-17AH | EVQLQQSGAELVKPGASVKLSCTASGFNIKDTYMHWVKQRPEQGLEWIGRIAPANGKTKFDPKFQGKATITADTSSNTAYLQ | 96 |
| | LSSLTSEDTAVYYCANYYGRSNDWFVYWGQGTLVTVSA | |
| H5S15-1AH | EVQLQQSGAELVKPGASVKLSCTASGFNIKDTYMHWVKQRPEQGLAWIGRIAPANGYTKYDPKFQGKATITTDTSSNTAYLH | 97 |
| | LSRLTSEDTAVYYCANYFGNTYDWFAFWGQGTLVTVSA | |
| H5S15-24AH | EVQLQQSGAELVKPGASVKLSCTASGFNIKDTYMHWVKQRPEQGLEWIGRIAPANGRTKYDPKFQGKATITADTSSNTAYLQ | 98 |
| | LSSLTSEDTAVYYCANYYASSYDWFVYWGQGTLVTVSA | |
| H5S15-36AH | EVQLQQSGAELVKPGASVKLSCTASGFNIKDTYMHWVKQRPEQGLEWIGRIDPANGNTKYDPKFQGKATITADTSSNTAYLQ | 99 |
| | LSSLTSEDTAVYYCARPYGNYGFAYWGQGTLVTVSA | |
| H5S15-37AH | QVQLQQPGAELVKPGAPVKLSCKASGYTFSTYWMNWVKQRPGRGLEWIGRIDPSDSETHYNQKFKDKATLTVDKSSSTAYI | 100 |
| | QLSSLTSEDSAVYYCAIYYSNPVFDYWGQGTTLTVSS | |
| H5S15-3AH | EVQLQQSGAELVKPGASVKLSCTASGFNIKDTYMHWVKQRPEQGLAWIGRIAPANGYTKYDPKFQGKATITTDTSSNTAYLQ | 101 |
| | LSSLTSEDTAVYYCVTYFGNTYDWFAYWGQGTLVTVSA | |
| H5S20-10AH | EVQLQQSGAELVKPGASVKLSCTASGFNIKDTYMHWVNQRPEQGLEWIGRIDPANGNTKYAPKFQGKATITADTSSNTVYLQ | 102 |
| | LSSLTSEDTAVYYCAGYGNSPWFAYWGQGTLVTVSA | |
| H5S20-10BH | EVQLQQSGAELVKPGASVKLSCTASGFNIKDTYMHWVNQRPEQGLEWIGRIDPANGNTKYAPKFQGKATITADTSSNTAYLQ | 103 |
| | LSSLTSEDTAVYYCAGYGNSPWFAYWGQGTLVTVSA | |
| H5S20-17AH | EVQLQQSGAELVKPGASVKLSCTASGFNIKDTYMHWVNQRPEQGLEWIGRIDPANGKTKYAPKFQDKATITADTSSNTAYLQ | 104 |
| | LSSLTSEDTAVYYCAGYGNSPWFAYWGQGTLVTVSA | |
| H5S20-49AH | EVQLQQSGAELVKPGASVKLSCTASGFNIKDTYVHWVKERPEQGLEWIGRIDPANDNTKYAPKFQVKATITADTSSNTAYLQL | 105 |
| | SSLTSEDNAVYYCAPYGNYPAWFAYWGQGTLVTVSA | |
| H5S20-52AH | EVQLQQSGAELVKPGASVKLSCTASGFNIKDTYIHWLNQRPEQGLEWIGRIDPANGKTKFAPKFQDKATITADTSSNTAYLQL | 106 |
| | SSLTSEDTAVYYCAGYGNSPWFAYWGQGTLVTVSA | |
| H5S20-58AH | EVQLQQSGAELVKPGASVMLSCTASGFYIKDTYMHWVNQRPEQGLEWIGRIDPANGKTKYAPKFQDKATITADSSSNTAYLQ | 107 |
| | LSSLTSEDTAVYYCAGYGNSPWFAYWGQGTLVTVSA | |
| H5S20-9AH | EVQLQQSGADLVKPGASVKLSCTASGFNIRDTYMHWVNQRPEQGLEWIGRIDPANGNTKYAPKFQGRATITADTSSNTAYLH | 108 |
| | LSSLTSEDTAVYYCAGYGNSPWFAYWGQGTLVTVSA | |
| ITI_091H | EVQLQQSGAELLKPGASVRLSCTASGFNFKDTYMHWVNQRPEQGLEWIGRIDPANGKTKYAPKFQGKATITADTSSNTAYLQ | 109 |
| | LSSLTSEDAAVFYCAAYGNSPWFAYWGQGTLVTVSA | |
| ITI_122H | QVQLQQSGAELVRPGTSVKVSCKASGYAFTNYLIEWVKQRPGQGLEWIGVINPGSGGTNYNEKFRGKATLTADKSSSTAYM | 110 |
| | QLSSLTSDDSAVYFCARRGHNYGPWFAYWGQGTLVTVSA | |
| H5S14-10AH | QVTLKESGPGILQPSQTLSLTCSFSGFSLSTSGMGVSWIRQPSGKGLEWLAHIYWDDDKRYNPSLKSRLTISKDTSRNQVFLK | 111 |
| | ITSVDTADTATYYCARSMYGNYNYAMDYWGQGTSVTVSS | |
| H5S14-16AH | EVQLVESGGGLVKPGGSLKLSCAASGFTFSDYYMYWVRQTPEKRLEWVATISDGGSYTYYPDSVKGRFTISRDNAKNNLYL | 112 |
| | QMSSLKSEDTAMYYCARDGNYYAMDYWGQGTSVTVSS | |
| H5S14-20AH | QVQLQQPGAELVRPGASVKLSCKASGYTFTNYWINWVKQRPGQGLEWIGNIYPSDSYTNYNQKFKDKATLTVDKSSSTAYM | 113 |
| | QLSSPTSEDSAVYYCTRGHYGNYDPYAMDYWGQGTSVTVSS | |
| H5S14-22AH | EVQLQQSGPELVKPGASVKMSCKASGYTFTSYVMHWVKQKPGQGLEWIGYINPYNDGTKYNEKFKGKATLTSDKSSSTAYM | 114 |
| | ELSSLTSEDSAVYYCARGIITTVIEPILYAMDYWGQGTSVTVSS | |
| H5S14-26AH | QVQLQQSGAELVRPGTSVKVSCKASGYAFTNYLIEWVKQRPGQGLEWIGVINPGSGGTKYNEKFKGKATLTADKSSSTAYM | 115 |
| | QLSSLTSDDSAVYFCARDYGSSYGYAMDYWGQGTSVTVSS | |
| H5S14-28AH | QVQLQQSGAELVRPGTSVKISCKASGYTFTNYWLSWVKQRPGHGLEWIGDIYPGGGYTNYNEKFKGKATLTADTSSSTAYM | 116 |
| | QLSSLTSEDSAVCFCARRVDYAMDYWGQGTSVTVSS | |
| H5S14-29AH | EVQLQQSGPELVKPGASVKMSCKASGYTFTSYVMHWVKQKPGQGLEWIGYINPYNDGTKYNEKFKGKATLTSDKSSSTAYM | 117 |
| | ELSSLTSEDSAVYYCARGIITTWVEPILYAMDYWGQGTSVTVSS | |
| H5S15-33AH | QVQLKQSGPGLVQPSQSLSITCTVSGFSLTTYGVHWVRQSPGKGLEWLGVIWSGGNTDYNPAFISRLSISKDNSKSQVFFKM | 118 |
| | NTLQASDTAIYYCARRGYNKGYAMDYWGQGTSFTVSS | |
| H5S15-40AH | EVQLVESGGGLVKPGGSLKLSCAASGFAFSSYDMSWVRQTPEKRLEWVAYISSGGGSTYYPDTVKGRFTISRDNAKNTLYL | 119 |
| | QMSSLKSEDTAMYYCARLLRYYAMDYWGQGTSVTVSS | |
| H5S19-9AH | QVQLKQSGPGLVQPSQSLSITCTVSGFSLTTYGVHWVRQSPGKGLEWLGVIWSGGSTDYNAAFISRLSISKDNSKSQVFFKM | 120 |
| | NSLQANDTAIYYCARRGYGSPYYYAMDYWGQGTSVTVSS | |
| H5S20-21AH | QVQLQQPGAELVKPGASVMMSCKASGYTFTNYWMHWVRQRPGQGLEWIGVIDPSDSFTNYNQSFRGKATLTVDTSSSTAY | 121 |
| | MRLSSLTSEDSAVYFCSRGERRGIYAMDYWGQGSSVTVSS | |
| ITI_130H | QVQLKQSGPGLVQPSQSLSITCTVSGFSLTTYGVHWVRQSPGKGLEWLGVIWSGGSTDYNAAFISRLSISKDNSKSQVFFKM | 122 |
| | NSLQANDTAIYYCARRGYGKGYAMDYWGQGTSVTVSS | |
| ITI_131H | QVQLKQSGPGLVQPSQSLSITCTVSGFSLTTYGVHWVRQSPGKGLEWLGVIWSGGSTDYNAPFISRLSISKDNSKSQVFFKM | 123 |
| | NSLQANDTAIYYCARRGYNKGYAMDYWGQGTSVTVSS | |
| ITI_180H | QVQLKQSGPGLVQPSQSLSITCTVSGFSLTTYGIHWVRQSPGKGLEWLGVIWSGGSTDYNAAFISRLSITKDKSKSQVFFKMN | 124 |
| | SLQANDTAIYYCARRGYGSPYYYAMDYWGQGTSVTVSS | |
| H5S15-15AH | QIQLVQSGPEVKKPGETVKISCKASGYTLTNYGMNWVKQAPGKGLKWVGWINTYTGEPTYADDFKGRFAFSLETSASTAYLQ | 125 |
| | INNLKNEDMATYFCARSFYGSEAYWGQGTLVTVSA | |
| H5S15-7AH | QIQLVQSGPELKKPGETVKISCKASGYTFTNYGMNWVKQAPGKGLKWVGWINTYTGEPTYAEDFKGRFAFSLETSASTAYLQ | 126 |
| | INNLKNEDMATYFCARSFYGSEAYWGQGTLVTVSA | |
| H5S15-7BH | QIQLVQSGPELKKPGETVKISCKASGYTFTNYGMNWVKQAPGKGLKWVGWINTYTGEPTYADDFKGRFAFSLETSASTAYLQ | 127 |
| | INNLKNEDMATYFCARSFYGSEAYWGQGTLVTVSA | |
| H5S19-13AH | QIQLVQSGPELKKPGETVKISCKASGYTFTNFGVNWVKQAPGKGLKWMGWINTYTGEPTYADDFKGRFAFSLETSASTAYLR | 128 |
| | INNLKNEDTATYFCARSYYANYAYWGQGTTLTVSS | |
| H5S19-3AH | QIQLVQSGPELKKPGETVKISCKASGYTFTNFGVNWVKQAPGKGLKWMGWINTYTGEPTYADDFKGRFAFSLETSASTAYLR | 129 |
| | INNLKNEDSATYFCARSFYKNYAFWGQGTILTVSS | |
| H5S19-3BH | QIQLVQSGPELKKPGETVKISCKASGYTFTNFGVNWVKQAPGKGLKWMGWINTYTGEPTYADDFKGRFAFSLETSASTAYLR | 130 |
| | INNLKNEDTATYFCARSFYKNYAFWGQGTILTVSS | |
| H5S19-3CH | QIQLVQSGPELKKPGETVKISCKASGYTFTNFGVNWVKQAPGKDLKWMGWINTYTGEPTYADDFKGRFAFSLETSASTAYLR | 131 |
| | INNLKNEDTATYFCARSFYKNYAFWGQGTILTVSS | |
| H5S19-8AH | QIQLVQSGPELKKPGETVKISCKASGYTFTNFGVNWVKQAPGKGLKWMGWINTYTGEPTYADDFKGRFAFSLETSASTAYLR | 132 |
| | INNLKNEDTASYFCARSYYANNAYWGQGTTLTVSS | |
| ITI_032H | QIQLVQSGPELKKPGETVKISCKASGYTFTNFGVNWVKQAPGKGLKWMGWINTYTGEPTYADDFKGRFAFSLETSASTAYLR | 133 |
| | INNLKNEDTATYFCARSFYKNYAFWGQSTILTVSS | |
| ITI_035H | QIQLVQSGPELKKPGETVKISCKASGYTFTNFGVNWVKQAPGKGLKWMGWINTYTGEPTYADDFKGRFAFSLETSASTAYLR | 134 |
| | INNLKNEDTATYFCARSYYGNYAYWGQGTTLTVSS | |
| ITI_082H | QIQLVQSGPELKKPGETVKISCKASGYTFTNYGMNWVKQAPGKGLKWMGWINTYTGEPTYADDFKGRFAFSLETSASTAYL | 135 |
| | QINNLKNEDTATYFCARSFTTATCYWGQGTTLTVSS | |
| ITI_083H | QIQLVQSGPELKKPGETVKISCKASGYTFTNYGMNWVKQAPGKGLKWMGWINTYTGEPTYDDDFKGRFAFSLETSASTAYL | 136 |
| | QINNLKNEDTATYFCARSFTTATCYWGQGTTLTVSS | |
| H5S14-18AH | EVQLVETGGGLVQPKGSLKLSCAASGFTFNTNAMNWVRQAPGKGLEWVARIRSKSNNYATYYADSVKDRFTISRDDSQSML | 137 |
| | YLQMNNLKTEDTAMYYCVREGGYGNYPYFDYWGQGTTLTVSS | |
| H5S14-23AH | LVKTGASVKISCKASGYSFTGYYMHWVKQSHGKSLEWIGYISCYNGATSYNQKFKGKATFTVDTSSSTAYMQFNSLTSEDSA | 138 |
| | VYYCARTYYYGSSYGAMDYWGQGTSVTVSS | |
| H5S14-30AH | EVQLVESGGDLVKPGGSLKLSCAASGFTFSSYGMSWVRQTPDKRLEWVATISSGGSYTYYPDSVKGRFTISRDNAKNTLYLQ | 139 |
| | MSSLKSEDTAMYYCARQGGHGNYGAMDYWGQGTSVTVSS | |
| H5S15-14AH | EVQLQQSGPELVKPGASVKMSCKASGYTFTSYVMHWVKQKPGQGLEWIGYINPYNDDTNCNEKFKGKATLTSDKSSSTAYM | 140 |
| | ELSRLTSEDSAVYYCAKARGYGSTFYYSMDYWGQGTSVTVSS | |
| H5S15-25AH | EVQLQQSGPELVKPGASVKMSCKASGYKFNSYVMHWVKQKPGQGPEWIGYINPYNDDTNCNEKFKGKATLTSDKSSSTAY | 141 |
| | MELSSLTSEDSAVYYCAKARGYGGNFYYSMDYWGQGTSVTVSS | |
| H5S15-5AH | EVQLQQSGPELVKPGASVKMSCKASGYTFTSYVMHWVKQKPGQGLEWIGYINPYNDDTNCNEKFKGKATLTSDKSSSTAYM | 142 |
| | DLSSLTSEDSAVYYCAKARGYGGSFYYSMDYWGQGTSVTVSS | |
| H5S20-44AH | EVKLVESGGGLVQPGGSLKLSCAASGFTFSSYTMSWVRQTPEKRLEWVAYISNGGGSTYYPDTVKGRFTISRDNAKNTLYLQ | 143 |
| | MSSLKSEDTAMYYCARHRGYGSSYNYAMDYWGQGTSVTVSS | |
| H5S20-46AH | EVKLVESGGGLVQPGGSLKLSCAASGFTFSSYTMSWVRQTPEKRLEWVAYISNGGGSTYYPDTVKGRFTISRDNAKNTLYLQ | 144 |
| | MSSLKSEDTAMYYCARHRGYGNYVYAMDYWGQGTSVTVSS | |
| H5S20-51AH | QVQLKQSGPGLVQPSQSLSITCTVSGFSLTSYGVHWVRQSPGKGLEWLGVIWRGGSTDYNAAFMSRLSITKDNSKSQVFFK | 145 |
| | MNSLQADDTAIYYCAKNRGYGEGYYAMDYWGQGTSVTVSS | |
| H5S20-53AH | EVQLVESGGGLVKPGGSLKLSCAASGFTFSSYAMSWVRQSPEKRLEWVAEISSGGSYTYYPDTVTGRFTISRDNAKNTLYLE | 146 |
| | MSSLRSEDTAMYYCAREGLRRDYYALDYWGQGTSVTVSS | |
| H5S20-55AH | EVKLVESGGGLVQPGGSLKLSCAASGFTFSSYTMSWVRQTPEKRLEWVADISNGGGSTYYPDTVKGRFTISRDNAKNTLYL | 147 |
| | QMSSLKSEDTAMYYCARHRGYGNYVYAMDYWGQGTSVTVSS | |
| H5S20-59AH | EVKLVESGGGLVKPGGSLKLSCAASGFTFSSYAMSWVRQTPEKRLEWVASISSGSSTYYPDSVKGRFTISRDNARNILYLQM | 148 |
| | SSLRSEDTAMYYCAKGRGYGNYLYAMDYWGQGTSVTVSS | |
| H5S15-19AH | QVQLKESGPGLVAPSQSLSITCTVSGFSLTGYGVNWVRQPPGKGLEWLGMIWGDGGTDYNSALKSRLSISKDNSKSQVFLK | 149 |
| | MNSLQTDDTARYYCARDNYHTVVNGDYWGQGTSVTVSS | |
| H5S15-32AH | QVQLKESGPGLVAPSQSLSITCTVSGFSLTGYGVNWVRQSPGKGLEWLGMIWGDGSTDYNSALKSRLSISKDNSKSQIFLKM | 150 |
| | NSVQTEDTARYYCARDSYRTMTNGDYWGQGTSVTVSS | |
| H5S19-16AH | QIQLVQSGPELKKPGETVKISCKASGYTFTNFGVNWVKQAPGKGLKWMGWINTYTGEPTYADDFKGRFAFSLETSASTAYLQ | 151 |
| | INNLKNEDTATYFCVRSYYGNSGYWGQGTTLTVSS | |
| H5S19-19AH | QIQLVQSGPELKKPGETVKISCKASGYTFTNYGMNWVKQAPGKGLKWMGWINTYTGEPTYADDFKGRFAFSLETSASTAYL | 152 |
| | QINNLKNEDTATYFCVRSYYGNSGYWGQGTTLTVSS | |
| H5S20-12AH | QIQLVQSGPELKKPGETVKISCKASGYTFTNFGMNWVRQAPGKGLKWMGWINTYTGEPTYADDFKGRFAFSLETSASTAYL | 153 |
| | QINNLKNDDMATYFCARSLYGNRDYWGQGTTLTVSS | |
| H5S20-18AH | QIQLVQSGPELKKPGETVKISCKASGYIFTNYGMNWVRQAPGKGLKWMGWINTYTGEPTYADDFKGRFAFSLETSASTAYLQ | 154 |
| | INNLKNEDMATYFCARSFYGNRDYWGQGTTLTVSS | |
| ITI_100H | QIQLVQSGPELKKPGETVKISCKASGYTLTNFGMNWMKQAPGKGLKWMGWINTYTGEPTYAGDFKGRFAFSLETSASTAYL | 155 |
| | QINNLKNEDTATYFCVRSYYGNSGYWGQGTTLTVSS | |
| ITI_101H | QIQLVQSGPELKKPGETVKISCKASGYTLTNFGMNWMKQAPGKDLKWMGWINTYTGEPTYAGDFKGRFAFSLETSASTAYL | 156 |
| | QINNLKNEDTATYFCVRSYYGNSGYWGQGTTLTVSS | |
| H5S15-13AH | QVQLKQSGPGLVQPSQSLSITCTVSGFSLTSYGVHWVRQSPGKGLEWLGVIWRGGSTDYNAAFMSRLSITKDNSKSQVFFK | 157 |
| | MNSLQADDTAIYYCAKTGFAYWGQGTLVTVSA | |
| H5S15-28AH | QVQLQQSGAELVKPGASVKMSCKAFGYTFTTYPIEWMKQNHGKSLEWIGNFHPYNDDTKYNEKFKGKAKLTVEKSSSTVYL | 158 |
| | ELSRLTSDDSAVYYCARGGFAYWGQGTLVTVSA | |
| H5S15-39AH | QIQLVQSGPELKKPGETVKISCKASGYTFTDYSMHWVKQAPGKGLKWMGWINTETGEPTYADDFKGRLAFSLETSASTAFLQ | 159 |
| | INNLKNEDTATYFCANWAGFAYWGQGTLVTVSA | |
| ITI_236H | EVQLQQSGPELVKPGASVKMSCKASGYTFTSYVMHWVKQKPGQGLEWIGYINPYNDGTKYNEKFKGKATLTSDKSSSTAYM | 160 |
| | ELSSLTSEDSAVYYCARERTGPFAYWGQGTLVTVSA | |
| ITI_238H | QVQLQQPGAELVMPGASVKMSCKASGYTFTDYWMHWVKQRPGQGLEWIGAIDTSDSYTSYNQKFKGKATLTVDESSSTAY | 161 |
| | MQLSSLTSEDSAVYYCARSARAAWFAYWGQGTLVTVSA | |
| ITI_240H | QIQLVQSGPELKKPGETVKISCKASGYTFTNYGMNWVKQAPGKGLKWMGWINTYTGEPTYADDFKGRFAFSLETSASTAYL | 162 |
| | QINNLKNDDTATYFCARELLRSAWFAYWGQGTLVTVSA | |
| H5S20-20AH | EVQLQQSGAELVRSGASVKLSCTASGFNIKDYYMHWVKQRPEQGLEWIGWIDPENGDTEYAPKFQGKATMTADTSSNAAYL | 163 |
| | QLSSLTSEDTAVYYCNSRTLGYWGQGTLVTVSA | |
| H5S20-20BH | EVQLQQSGAELVRSGASVKLSCTASGFNIKDYYMHWVKQRPEQGLEWIGWIDPENGDTEYAPKFQGKATMTADTSSNTAYL | 164 |
| | QLSSLTSEDTAVYYCNSRTLGYWGQGTLVTVSA | |
| H5S20-31AH | EVQLQQSGAELVRSGASVKLSCTTSGFNIKDYYMHWVKQRPEQGLEWIGWIDPENGDTEYAPKFQGKATMTADTSSNTAYL | 165 |
| | QLSSLTSEDTAVYYCNSRTLGYWGQGTLVTVSA | |
| H5S20-31BH | EVQLQQSGAELVRSGASVKLSCTTSGFNIKDYYMHWVKQRPEQGLEWIGWIDPENGDTEYAPKFQGKATMTADTCSNTAYL | 166 |
| | QLSSLTSEDTAVYYCNSRTLGYWGQGTLVTVSA | |
| H5S20-45AH | EVQLQQSGAELVRSGASVKLSCAASGFNIKDYYMHWVKQRPEQGLEWIGWIDPENGDTEFAPKFQGKATLTADTSSNTAYL | 167 |
| | QLSSLTSEDTAVYYCNTRTLGYWGQGTLVTVSA | |
| H5S15-18AH | QVQLQQSGAELVRPGTSVKMSCKAAGYTFTNSWIGWVKQRPGHGLEWIGDIYPGGGYTNYYEKFKVKATLTADTSSSTAYM | 168 |
| | QLSSLTSEDSAIYYCASSGAYWGQGTTLTVSS | |
| H5S15-26AH | QVQLQQSGAELVRPGTSVKMSCKAAGYTFTNSWMGWVKQRPGHGLEWIADIYPGGGYSNYNEKFKGKATLTADTSSSTAY | 169 |
| | MQLSSLTSEDSAIYYCASSGAYWGQGTTLTVSS | |
| H5S15-8AH | QVQLQQSGAELVRPGTSVKMSCKAAGYTFTDSWIGWVKQRPGHGLEWIGDIYPGGGYTNYNEKFKGKATLTADTSSSTAYM | 170 |
| | QLSRLTSEDSAIYYCASSGAYWGQGTTLTVSS | |
| H5S19-4AH | QVQLKESGPGLVAPSQSLSITCTVSGFSLTGYGVNWVRQPPGKGLEWLGMIWGDGNTDYNSALKSRLSISKDNSKSQVFLK | 171 |
| | MNSLQTDDTARYYCARSYGSYWGQGTLVTVSA | |
| H5S20-56AH | EVKLVESGGGLVKPGGSLKLSCAASGFTFSSYGMSWVRQTPEKRLEWVATISGGGSYTFYPDSVKGRFTISRDNAKNNLYL | 172 |
| | QVSSLRSEDTALYYCIYDGSYWGQGTLVTVSA | |
| H5S14-24AH | EVQLQQSGPELVKPGTSVKISCKTSGYTITEYTMHWVKQSHGKSLEWIGGINPNNGGTINNQKFKDKATLTVDMSSSTAYME | 173 |
| | LRSLTSEDSAVYYCAGSVVDRYWYFDVWGAGTTVTVSS | |
| H5S14-4AH | EVQLQQSGPELVKPGASVKISCKTSGYTFTEYTMHWVKQSHGKSLEWIGGINPYNGGTINNQKFKGKATLTVDMSSSTAYME | 174 |
| | LRSLTSEDSAVYYCAGSVVDRYWYFDVWGAGTTVTVSS | |
| H5S14-7AH | EVQLQQSGPELVKPGASVKISCKTSGYTFTEYTMHWVKQSHGKSLEWIGGINPNNGGTINNQKFKGKATLTVDMSSSTAYME | 175 |
| | LRSLTSEDSAVYYCAGSVVDRYWYFDVWGAGTTVTVSS | |
| ITI_040H | EVQLQQSGPELVKPGTSVKISCKTSGYTFTEYTMHWVKQSHGKSLEWIGGINPNNGGTINNQKFKGKATLTVDMSSSTAYME | 176 |
| | LRSLTSEDSAVYYCAGSVVDRYWYFDVWGAGTTVTVSS | |
| H5S14-2AH | QVQLQQPGAELVKPGTSVKMSCKASGYTFTSYWMHWVKQRPGQGLEWIGDIYPGSDSTNYNEKFKSKATLTVDTSSSTAY | 177 |
| | MQLSSLTSEDSAVYYCARSGYYGSYLDYWGQGTTLTVSS | |
| H5S15-27AH | EVQLQQSGAELVKPGASVKLSCTASGFNIKDTYMHWVKQRPEQGLEWIGRIDPANGNTKYDPKFQGKATITADTSSNTAYLQ | 178 |
| | LSSLTSEDTAVYYCARSRRYFDVWGAGTTVTVSS | |
| H5S20-22AH | EVQLQQSGAELVKPGASVKLSCTASGFNIKDTYMHWVKQRPEQGLEWIGRIDPANGNTKYAPKFQGKATITADTSSNTAYLQ | 179 |
| | LSSLTSEDTAVYYCARSFGNYFDYWGQGTTLTVSS | |
| ITI_237H | LQQSGAGLVKPGASVKLSCKASGYTFTEYIIYWVKQRSGQGLEWIGWFYPGSGSIRYNEKFKDKATLTADKSSTTVYMDLSR | 180 |
| | LTSEDSAVYFCARHEDGYLDYWGQGTTLTVSS | |
| H5S15-21AH | QIQLVQSGPDLKKPGETVKISCKASGYTFTNYGMNWVKQAPGKDLKWMGWINTYTGEPTYADDFKGRFAFSLETSASTAYL | 181 |
| | QINNLKNDDTATYFCARSINYDSDEKWGQGTSVTVSS | |
| H5S20-26AH | QIQLVQSGPELKKPGETVKISCRASGYTFTNYGMNWVKQAPGKGLKWMGWINTYTGEPTYADDFKGRFAFSLETSASSAYL | 182 |
| | QINNLKNEDMATYFCARSLYYGDNYEAYWGQGTLVTVSA | |
| ITI_127H | QIQLVQSGPEVKKHGETVKISCKASGYIFTNYGINWVKQAPGKGLKWMGWINTYTREPTYADDFKGRFAFSLETSASSAYLQI | 183 |
| | SNLTTEDMATYFCARSLYYVNNYEAYWGQGTLVTVSA | |
| ITI_128H | QIQLVQSGPELKKHGETVRISCKASGYIFTDYGINWVKQAPGKGLKWMGWINTYTGKPTYADDFKGRFAFSLETSASTAYLQI | 184 |
| | NNLKTEDMATYFCARSLYYGNNYEACWGQGTLVTVS | |
| H5S15-6AH | QVQLQQSGAELVRPGTSVKMSCKAAGYTFTNSWIGWVKQRPGHGLEWIGDIYPGGAYTKYNEKFKGKATLTADTSSSTAYM | 185 |
| | QLSSLTSEDSAIYYCASGRDYWGQGTTLTVSS | |
| ITI_045H | QVQLKQSGPGLVQPSQNLSITCTVSGFSLTSYGVHWIRQSPGKGLEWLGVIWSGGGTDYNAAFISRLSISKDNSKSQVFFKM | 186 |
| | NSLQADDTAIYYCASLYYWGQGTLVTVSA | |
| ITI_046H | QVQLKQSGPGLVQPSQNLSITCTVSGFSLTSYGVHWIRQSPGKGLEWLGVIWSGGGTDYNAAFISRLTISKDNSKSQVFFKM | 187 |
| | NSLQADDTAIYYCASLYYWGQGTLVTVSA | |
| H5S15-29AH | EVQLQQSGAELVRPGALVKLSCKASGFNIKDDYMHWVKQRPEQGLEWIGWIDPENGNTIYDPKFQGKASITADTSSNTAYLQ | 188 |
| | LSSLTSEDTAVYYCARGYSSSPYWGQGTLVTVSA | |
| H5S15-2AH | EVQLQQSGAELVKPGASVKLSCTASGFNIKDTYMHWVKQRPEQGLEWIGRIDPANDNTKYDPKFQGKATITADTSSNTAYLQ | 189 |
| | LSSLTSEDTAVYYCARVYYAMDYWGQGTSVTVSS | |
| H5S19-24AH | QVQLQQSGGELLRPGTSVKVSCKASGYAFTNYLIEWVKQRPGQGLEWIGVINPGSGGIYYKEKFKDKAILTADKSSSTAYMQL | 190 |
| | SSLTSDDSAVYFCARGDAMDFWGQGTSVTVSS | |
| H5S14-1AH | DVKLVESGGGLVKPGGSLKLSCAASVFTFSRYTMSWVRQTPEKRLEWVATISSGGSYTYYPDSVKGRFTISRDNAKNTLYLQ | 191 |
| | MSSLKSEDTAIYYCTRGGDGLFDYWGQGTALTVSS | |
| H5S19-5AH | DVKLVESGGGLVKPGGSLKLSCAASGFTFSSYTMSWVRQTPEKRLEWVATISSGGSYTYYPDSVKGRFTISRDNAKNTLYLQ | 192 |
| | MSSLKSEDTAMYYCTRGDDYGFDYWGQGTTLTVSS | |
| ITI_203H | EVQLVESGGDLVKPGGSLKLSCAASGFTFSSYGMSWVRQTPDKRLEWVATISSGGSSTYYPDSVKGRFTISRDNAKNTLYLQ | 193 |
| | MNSLKSEDTAMYYCTRHELGNRSRFPYWGQGTLVTVSA | |
| H5S14-21AH | QVQLQQPGSELVRPGASVKLSCKASGYTFTSYWMHWVKQRPGQGLEWIGNIYPGSGSTNYDEKFKSKATLTVDTSSSTAY | 194 |
| | MQLSSLTSEDSAVYYCTIYDGYYWGQGTLVTVSA | |
| H5S14-27AH | EVKLDETGGGLVQPGRPMKLSCVASGFTFSDYWMNWVRQSPEKGLEWVAQIRNKPYNYETYYSDSVKGRFTISRDDSKSS | 195 |
| | VYLQMNNLRAEDMGIYYCTWGNYWGQGTTLTVSS | |
| H5S14-5AH | DVQLQESGPGLVKPSQSLSLTCTVTGYSITSDFAWNWIRQFPGNKLEWMGYIVYSGSTSYNPSLKSRISITRDTSKNQFFLQL | 196 |
| | NSVTAEDTATYFCTRGMDYWGQGTSVTVSS | |
| H5S19-1AH | DVQLQESGPGLVKPSQSLSLTCTVTGYSITSDYAWNWIRQFPGNKLEWMGYIAYSGGTSYSPSLKSRISITRDTSKNQFFLQL | 197 |
| | NSVTTEDTATYYCVYFKYGGAFAYWGQGTLVTVSA | |
| ITI_023H | EVQLQQSGAELMSPGASVNLSCTASGFNIKDTYIHWVKQRPEQGLEWIGKIDPANGNTKYDPKFQDKATITTDASSNTAYLQL | 198 |
| | SSLTSEDTAVYYCTKSLLWSLGGFAYWGQGTLVTVSA | |
| H5S14-3AH | QIQLVQSGPELKKPGETVKISCKASGYTFTNYGVNWVKQAPGKDLKWMGWINTYTGEPTYADDFKGRFAFSLETSASTAYLQ | 199 |
| | INNLKNEDMATYFCTSRSWVLWGQGTLVTVSA | |
| H5S20-27AH | EVQLQQSGTVLARPGASVKMSCKASGYSFTSYWMHWLKQRPGQGLEWIGAIYPGNSDTVFNQKFKGKAKLTAVTSATTAY | 200 |
| | MELSSLTNEDSAVYYCTKEPRTIEGAWFTYWGQGTLVTVSA | |
| H5S15-23AH | EVQLQQSGTVLARPGASVKMSCKASGYTFTSFWMHWVKQRPGQGLEWIGAISPGNSETTYNQKFTGKAKLTAVTSTSTAYM | 201 |
| | ELSSLTNEDSAVYYCTKIYYDYDDGYWGQGTTLTVSS | |
| H5S14-15AL | SIVMTQTPKFLLVSAGDRVTITCKASQSVSNDVAWYQQKPGQSPKLLIYYESNRYTGVPDRFTGSGYGTDFTFTISTVQAEDL | 874 |
| | AVYFCQQDYSSPWTFGGGTKLEIK | |
| H5S14-16AL | SIVMTQTPKFLLVSAGDRVTITCKASQSVSNDVAWYQQKPGQSPKLLIYYASNRYTGVPDRFTGSGYGTDFTFTISTVQAEDL | 875 |
| | AVYFCQQDYSSPWTFGGGTKLEIK | |
| H5S14-18AL | QIVLTQSPAIMSASPGEKVTMTCSASSSVSYMHWYQQKSGTSPKRWIYDTSKLASGVPARFSGSGSGTSYSLTISSMEAEDA | 876 |
| | ATYYCQQWSSNPFTFGSGTKLEIK | |
| H5S14-1AL | DVQITQSPSYLAASPGETITINCRASKSISKYLAWYQEKPGKTNQLLIYSGSTLQSGIPSRFSGSGSGTDFTLTISSLEPEDFAM | 877 |
| | YYCQQHNEYPWTFGGGTKLEIK | |
| H5S14-20AL | NIVLTQSPASLAVSLGQRATISCRASESVDSYGNSFMHWYQQKPGQPPKLLIYLASNLESGVPARFSGSGSRTDFTLTIDPVE | 878 |
| | ADDAATYYCQQNNEDPYTFGGGTKLEIK | |
| H5S14-24AL | SIVMTQTPKFLLVSAGDRVTITCKASQSVSNDVAWYQQKPGQSPKLLIYYASNRYTGVPDRFTGSGYGTDFTFTISTVQAEDL | 879 |
| | AVYFCQQDYSSPLTFGAGTKLELK | |
| H5S14-25AL | DIQMTQSSSYLSVSLGGRVTITCKASDHINNWLAWYQQKPGNAPRLLISGATSLETGVPPRFSGSGSGKDYTLSITSLQTEDV | 880 |
| | ATYYCQQYWSTPYTFGGGTKLEIK | |
| H5S14-4AL | QIVLTQSPAIMSASPGEKVTISCSASSSVSYMYWYQQKPGSSPKPWIYRTSNLASGVPARFSGSGSGTSYSLTISSMEAEDAA | 881 |
| | TYYCQQYHSYPLTFGAGTKLELK | |
| H5S14-4BL | QIVLTQSPAIMSASPGEKVTISCSASSSVSYMYWYQQKPGSSPKPWIYRTSNLASGVPARFSGSGSGSSYSLTISSMEAEDAA | 882 |
| | TYYCQQYHSYPLTFGAGTKLELK | |
| H5S14-6AL | DIQMTQSPASQSASLGESVTITCLASQTIGTWLAWYQQKPGKSPQLLIYAATSLADGVPSRFSGSGSGTKFSFKISSLQAEDF | 883 |
| | VSYYCQQLHSTPYTFGGGTKLEIK | |
| H5S15-13AL | DIVLTQSPASLAVSLGQRATISCKASQSVDYDGESYMNWYQQKPGQPPKLLIYAASNLDSGIPARFSGSGSGTDFTLNIHPVE | 884 |
| | EEDAATYYCQQSNEDPLTFGAGTKLELK | |
| H5S15-14AL | DIVMTQSQKFMSTSVGDRVSVTCKASQNVGTNVAWYQQKPGQSPKALIYSASYRYSGVPDRFTGSGSGTDFTLTISNVQSE | 885 |
| | DLAEYFCQQYNSYPYTFGGGTNLEIK | |
| H5S15-14BL | DIVMTQSQKFMSTSVGDRVSVTCKASQNVGTNVAWYQQRPGQSPKSLIYSASYRYSGVPDRFTGSGSGTDFTLTISNVQSE | 886 |
| | DLADYFCQQYNSYPYTFGGGAKLEIK | |
| H5S15-14CL | DIVMTQSQKFMSTSVGDRVSVTCKASQNVGTNVAWYQQKPGQSPKALIYSASYRYSGVPDRFTGSGSGTDFTLTISNVQSE | 887 |
| | DLAEYFCQQYNSYPYTFGGGTKLEI | |
| H5S15-15AL | QIVLTQSPAIMSASPGEKVTMTCSASSSVSYMHWYQQKSGTSPKRWIYDTSKLASGVPARFSGSGSGTSYSLTISSMEAEDA | 888 |
| | ATYYCQQWSSNPLTFGAGTKLELK | |
| H5S15-18AL | ENVLTQSPAIMSASPGEKVTMTCRASSSVSSSYLHWYQQKSGASPKLWIYSTSNLASGVPARFSGSGSGTSYSLTISSVEAE | 889 |
| | DAATYYCQQYSGYPLTFGGGTKLEIK | |
| H5S15-24AL | DIVLTQSPASLAVSLGQRATISCKASQSVDYDGNSYMNWYQQKPRQPPKLLIYAASNLESGIPARFRGSGSGTDFTLNIHPVE | 890 |
| | EEDAATYYCQQSNEDPFTFGSGTKLEIK | |
| H5S15-28AL | DIQMTQTTSSLSVSLGDRVTISCRASQDISNYLNWYQQKPDGTVKLLIYYTSRLHSGVPSRFSGSGSGSDYSLTISNLEQEDIA | 891 |
| | TYFCQQGNSLPWTFGGGTKLEIK | |
| H5S15-29AL | EIVLTQSPALMTASPGEKVTITCSVSSTISSRNLHWYQQKSEASPKPWIYGTSNLASGVPVRFSGSGSGTSYSLTISSMEAEDA | 892 |
| | ATYYCQQWNSYPLTFGSGTKLEIK | |
| H5S15-4AL | EIVLTQSPALMAASPGEKVTITCSVSSGIRSSNLHWYQQKSETSPKPWIYGTSNLASGVPIRFSGSGSGTSYSLTISSMEAEDA | 893 |
| | ATYYCQQWSSYPLTFGSGTKLEIK | |
| H5S19-11AL | EIVLTQSPALMAASPGEKVTITCSVSSSISSSNLHWYQQKSETSPKPWIYGTSNLASGVPVRFSGSGSGTSYSLTISSMEAEDA | 894 |
| | ATYYCQQWSSYPLTFGAGTKLELK | |
| H5S19-17AL | DIQMTQTTSSLSASLGDRVTISCSASQGISNYLNWYQQKPDGTVKLLIYYTSSLHSGVPSRFSGSGSGTDYSLTISNLEPEDIA | 895 |
| | TYYCQQYSKLPWTFGGGTKLEIK | |
| H5S19-17BL | DIQMTQTTSSLSASLGDRVTISCSASQGISNYLNWYQQKPDGTVKLLIYYTSSLHSGVPSRFRGSGSGTDYSLTISNLEPEDIA | 896 |
| | TYYCQQYSKLPWTFGGGTKLEIK | |
| H5S19-17CL | DIQMTQTTSSLSASLGDRVTISCSASQGISNYLNWYQQKPDGTVKLLIYYTSSLHSGVPSRFSGSGSGTDYSLTISNLEPEDIA | 897 |
| | TYFCQQYSKLPWTFGGGTKLEIK | |
| H5S19-17DL | DIQMTQTTSSLSASLGDRVTISCSASQGISNYLNWYQQKPDGTVKLLIYYTSSLHSGVPSRFSGSGSGTDYSLSISNLEPEDIA | 898 |
| | TYYCQQYSKLPWTFGGGTKLEIK | |
| H5S19-17EL | DIQMTQTTSSLSASLGDRVTISCSASQGISNYLNWYQQKPDGTVKLLIYYTSSLHSGVPSRFSGSGSGTDYSLTFSNLEPEDIA | 899 |
| | TYYCQQYSKLPWTFGGGTKLEIK | |
| H5S19-17FL | DIQMTQTTSSLSASLGDRVTISCSASQGISNYLNWYQQKPDGTVKLLIYYTSSLHSGVPSRFSGSGSGTDYSLTISNLEPEDIA | 900 |
| | TYYCQQYSKLPWTFGGGTKLEI | |
| H5S19-1AL | NIVLTQSPASLAVSLGQRATISCRASESVDSYGNSLMHWYQQKPGQPPKLLIYLASNLESGVPARFSGSGSRTDFTLTIDPVE | 901 |
| | ADDAATYYCQQNNEDPPTFGGGTKLEI | |
| H5S19-20AL | DIQMTQTTSSLSASLGDRVTISCTASQGISNYLNWYQQKPDGTVKLLIYYTSTLHSGVPSRFSGSGSGTDYSLTISNLEPEDIAT | 902 |
| | YYCQQYFKLPWTFGGGTKLEIK | |
| H5S19-23AL | DIQMTQTTSSLSASLGDRVTISCSASQGINNYLNWYQQKPDGTVKLLIYYTSSLHSGVPSRFSGSGSGTDYSLTISNLEPEDIA | 903 |
| | TYYCQQYSKLPWTFGGGTKLEIK | |
| H5S19-26AL | DIQMTQTTSSLSASLGDRVTISCTASQGINNYLNWYQQKPDGTVKLLIYYTSTLHSGVPSRFSGSGSGTDYSLTISNLEPEDIAT | 904 |
| | YYCQQYFKLPWTFGGGTKLEIK | |
| H5S19-28AL | DIQMTQTTSSLSASLGDRVTISCTASQGISNYLNWYQQKPDGTVKLLIYYTSTLHSGVPSRFSGSGSGTDYSLTISNLEPEDIAT | 905 |
| | YYCQQYSKLPWTFGGGTKLAIK | |
| H5S19-6AL | QIVLTQSPAIMSASPGEKVTMTCSASSSVSYMYWYQQKPGSSPRLLIYDTSNLASGVPVRFSGSGSGTSYSLTISRMEAEDAA | 906 |
| | TYYCQQWSSYPFTFGSGTKLEIK | |
| H5S19-8AL | DVQITQSPSYLAASPGETITINCRTSKNISKYLAWYQEKPGKTNKLLIYSGSTLQSGIPSRFSGSGSGTDFTLTISSLEPEDFVM | 907 |
| | YHCQQHNEYPWTFGGGTKLEIK | |
| H5S20-13AL | DIVLTQSPASLAVSLGQRATISCKASQSVDYDGNSYMNWYQQKPGQPPKLLIYAASNLESGIPARFSGSGSGTDFTLNIHPVE | 908 |
| | EEDAATYYCQQSNEDPWTFGGGTKLEIK | |
| H5S20-16AL | QIVLTQSPALMSASPGEKVTMTCSASSSVSFIYWYQQKPRSSPKPWISLTSNLASGVPARFSGSGSGTSYSLTISSMEAEDAA | 909 |
| | TYYCQQWSSNPLTFGAGTKLEL | |
| H5S20-16BL | QIVLTQSPALMSASPGEKVTMTCSASSSVSFIYWYQQKPRSSPKPWIYLTSNLASGVPARFSGSGSGTSYSLTISSMEAEDAA | 910 |
| | TYYCQQWSSNPLTFGAGTKLEL | |
| H5S20-17AL | DIVMTQSPATLSVTPGDRVSLSCRASRTISDYLHWYQQKSHESPRLLIKYASQSISGIPSRFSGSGSGSDFTLSISSVEPEDVG | 911 |
| | MYYCQNGHSFPLTFGAGTKLELK | |
| H5S20-18AL | NIVLTQSPASLAVSLGQRATISCRASESVDSYGNSFMHWYQQKPGQPPKLLIYLASNLESGVPARFSGSGSRTDFTLTIDPVE | 912 |
| | ADDAATYYCQQNYADPWTFGGGTKLEIK | |
| H5S20-20AL | DIVLTQSPASLAVSLGQRATISCKASQSVDYDGDSFMNWYQQKPGQPPKLLIYAASNLESGIPARFSGSGSGTDFTLNIHPVE | 913 |
| | EEDAATYYCQQSNEDPWTFGGGTKLEIK | |
| H5S20-23AL | DIVMTQSPSSLTVPAGEKVTMSCKSSQSLLNSENQKNYLTWYQQKPGQPPKLLIYWASTRESGVPDRFTGSGSGTDFTLTIS | 914 |
| | SVQAEDLAVYYCQSDYSYPLTFGAGTKLELK | |
| H5S20-32AL | DIVMTQSQKFMSTSVGDRVSVTCKASQNVGTNVAWYQQKPGQSPKALIYSASYRYSGVPDRFTGSGSGTDFTLTISNVQSE | 915 |
| | DLAEYFCQQYNSYPFTFGSGTKLEIK | |
| H5S20-34AL | QIVLTQSPALMSASPGEKVTMTCTASSSVSYMYWYQQKPRSSPKPWIYLTSNLASGVPARFSGSGSGTSYSLTISSMEAEDA | 916 |
| | ATYYCQQWSSNPLTFGAGTKLELR | |
| H5S20-36AL | DIVMTQSQKFMSTSVGDRVSVTCKASQNVGTNVAWYQQKPGQSPKALIYSASYRYSGVPDRFTGSGSGTDFTLTISNVQSE | 917 |
| and H5S20- | DLAEYFCQQYNSYPLTFGGGTKLEIK | |
| 43AL | | |
| H5S20-40AL | DIVMTQSQKFMSTSVGDRVSVTCKASQNVGTNVAWYQQKPGQSPKALIYSASYRYSGVPDRFTGSGSGTDFTLTISNVQSE | 918 |
| | DLAEYFCQQYNSYPLTFGAGTKLELK | |
| H5S20-8AL | DIVLTQSPASLAVSLGQRATISCKASQSVDYDGDSYMNWYQQKPGQPPKLLIYAASNLESGIPARFSGSGSGTDFTLNIHPVE | 919 |
| | EEDAATYYCQQSNEDPWTFGGGTKLEIK | |
| H5S20-8BL | DIVLTQSPASLAVSLGQRATISCKASQSVDYDGDSYMNWFQQKPGQPPKLLIYAASNLESGIPARFSGSGSGTDFTLNIHPVE | 920 |
| | EEDAATYYCQQSNEDPWTFGGGTKLEIK | |
| ITI_021L | NIVLTQSPASLAVSLGQRATISCRASESVDSYGNSFMHWYQQKPGQPPKLLIYLASNLESGVPARFSGSGSRTDFTLTIDPVE | 921 |
| | ADDAATYYCQQNNEDPLTFGGGTKLEIK | |
| ITI_040L | QIVLTQSPAIMSASPGEKVTISCSASSSISYMYWYQQKPGSSPKPWIYRTSNLASGVPARFSGSGSGTSYSLTISSMEAEDAA | 922 |
| | TYYCQQYHSYPLTFGAGTKLELK | |
| ITI_045L | EIVLTQSPTTMAASPGEKITITCSASSSINSNYLHWYQQKPGFSPKLLIYRTSNLASGVPPRFSGSGSGTSYSLTIGTMEAEDVA | 923 |
| | TYYCQQGSTIPYTFGGGAKLEIK | |
| ITI_082L | ENVLTQSPAIMSASLGEKVTMSCRASSSVNYMYWYQQKSDASPKLWIYYTSNLAPGVPARFSGSGSGNSYSLTISSMEGED | 924 |
| | AATYYCQQFTSSTWTFGGGTKLEIK | |
| ITI_083L | ENVLTQSPAIMSASLGEKVTMSCRASSSVNYMFWYQQKSDASPKLWIYSTSNLTPGVPARFSGSGSGNSYSLTISSMEAEDA | 925 |
| | ATYYCQQFTSSTWTFGGGTKLEIK | |
| ITI_131L | EIVLTQSPALMAASPGEKVTITCSVSSSISSSNLHWYQQKSETSPKPWIYGTSNLASGVPVRFSGSGSGTSYSLTISSMEAEDA | 926 |
| | ATYYCQQWSSYPLTFGSGTKLEIK | |
| ITI_144L | DIQMTQTPSSLSASLGDRVTISCSASQDINNYLNWYQQKPDGTVKLLIYYTSSLHSGAPSRFSGSGSGTDYSLTISNLDPEDIA | 927 |
| | TYYCQQYSKLPWTFGGGTKLEIK | |
| ITI_145L | DIQMTQTPSSLSASLGDRVTISCSASQDINNYLNWYQQKPDGTVKLLIFYTSSLHSGAPSRFSGSGSGTDYSLTISNLDPEDIA | 928 |
| | TYYCQQYSKLPWTFGGGTKLEIK | |
| ITI_146L | DIQMTQTTSSLSASLGDRVTISCSASQGIRNYLNWYQQKPDGTVKLLIYYTSSLHSGVPSRFSGSGSGTDYSLTISNLEPEDIA | 929 |
| | TYYCQQYSKLPWTFGGGTKLEIK | |
| ITI_162L | DIQMTQTTSSLSASLGDRVTISCTASQGISNYLNWYQQKPDGTVKLLIYYTSTLHSGVPSRFSGSGSGTDYSLTINNLEPEDIAT | 930 |
| | YYCQQYSKLPWTFGGGTKLEIK | |
| ITI_166L | DIQMTQTTSSLSASLGDRVTISCSASQDISNYLNWYQQKPDGTVKLLIYYTSSLHSGVPSRFSGSGSGTDYSLTISNLEPEDIAT | 931 |
| | YYCQQYSKLPWTFGGGTKLEIK | |
| ITI_169L | DIQMTQTTSSLSASLGDRVTISCSASQGITKYLNWYQQKPDGTVKLLIYYTSSLHSGVPSRFSGSGSGTDYSLTISNLEPEDIAT | 932 |
| | YYCQQYSKLPWTFGGGTKLEIK | |
| ITI_200L | DIVLTQSPASLAVSLGQRATISCKASQSVDYDGESYINWYQQRPGQPAKLLIFAASNLESGIPARFSGSGSGTDFTLNIHPVEE | 933 |
| | EDAASYYCQHCYEDPWTFGGGTKLEIK | |
| ITI_236L | DIQMTQTTSSLSASLGDRVTISCRASQDISNYLNWYQQKPDGTVKLLIYYTSRLHSGVPSRFSGSGSGTDYSLTISNLEQEDIA | 934 |
| | TYFCQQGNTLPYTFGGGTKLEIK | |
| ITI_237L | DIQMTQTTSSLSASLGDRVTISCSASQGISNYLNWYQQKPDGTVKLLIYYTSSLHSGVPSRFSGSGSGTDYSLTISNLEPEDIA | 935 |
| | TYYCQQYSKLPRTFGGGTKLEIK | |
| H5S14-11AL | DVVMTQTPLTLSVTIGQPASISCKSSQSLLDSDGKTYLNWLLQRPGQSPKRLIYLVSKLDSGVPDRFTGSGSGTDFTLKISRVE | 936 |
| | AEDLGVYYCWQLTHFPQTFGGGTKLEIK | |
| H5S14-13AL | DVLMTQTPLSLPVSLGDQASISCRSSQSIVHSNGNTYLEWYLQKPGQSPKLLIYKVSNRFSGVPDRFSGSGSGTDFTLKISRV | 937 |
| and H5S19-7AL | EAEDLGVYYCFQGSHVPWTFGGGTKLEIK | |
| H5S14-17AL | DWVMTQTPLTLSVTIGQPASISCKSSQSLLDSDGKTYLNWLLQRPGQSPKRLIYLVSKLDSGVPDRFTGSGSGTDFTLKISRVE | 938 |
| | AEDLGVYYCWQVTHFPQTFGGGTKLEIK | |
| H5S14-2AL | DVVMTQTPLTLSVTIGQPASISCKSSQSLLDSDGKTYLNWLLQRPGQSPKRLIYLVSKLDSGVPDRFTGSGSGTDFTLKISRVE | 939 |
| | AEDLGVYYCWQGTHFPHAFGGGTKLEIK | |
| H5S15-12CL | DVVMTQTPLTLSVTIGQPASISCKSSQSLLDSDGKTYLNWLLQRPGQSPKRLIYLVSKLDSGVPDRFTGSGSGTDFTLKISRVE | 940 |
| | AEDLGIYYCWQGTHFPQTFGGGTKLEIK | |
| H5S15-16AL | DVLMTQTPLSLPVSLGDQASISCRSSQSIVHSNGITYLEWYLQKPGQSPELLIYKVSNRFSGVPDRFSGSGSGTDFTLKISRVE | 941 |
| | AEDLGVYYCFQGSHVPLTFGAGTKLELK | |
| H5S15-17AL | DVVMTQTPLTLSVTVGQPASISCKSSQSLLDSDGKTYLNWLLQRPGQSPKRLIYLVSKRDSGVPDRFTGSGSGTDFTLKISRV | 942 |
| | EAEDLGVYYCWQNTHFPQTFGGGTKLEIK | |
| H5S15-1AL | ENVLTQSPAIMSASPGEKVTMTCSAGSSVSYMHWYQQKSSTSPKLWIYDTSKLPSGVPGRFSGSGSGNSYSLTISSMEAED | 943 |
| | VATYYCFQGSGFPLTFGSGTKLEIK | |
| H5S15-31AL | DWVMTQTPLTLSVTIGQPASISCKSSQSLLDSDGKTYLNWLLQRPGQSPKRLIYLVSKLDSGVPDRFTGSGSGTDFTLKISRVE | 944 |
| | AEDLGVYYCWQATHFPQTFGGGTNLEIK | |
| H5S15-3AL | DVLMTQTPLSLPVSLGDQASISCRSSQSIVHSNGNTYLEWYLQKPGQSPKLLIYKVSNRFSGVPDRFSGSGSGTDFTLKISRV | 945 |
| | EAEDLGVYYCFQGSHVPLTFGAGTKLELK | |
| H5S15-3BL | DVLMTQTPLSLTVSLGHQASISCRSSQSIVHSNGNTYLEWYLQKPGQSPKLLIYKVSNRFSGVPDRFSGSGSGTDFTLKISRV | 946 |
| | EAEDLGVYYCFQGSHVPLTFGAGTKLELK | |
| H5S15-6AL | DVVMTQTPLTLSVTIGQPASISCKSSQSLLDSDGKTYLNWLLQRPGQSPKRLIYLVSKLDSGVPDRFTGSGSGTEFTLKISRVE | 947 |
| | AEDLGVYYCWQNTHFPQTFGGGTKLEIK | |
| H5S20-19AL | DVVMTQTPLTLSVTIGQPASISCKSSQSLLDSDGKTYLSWLLQRPGQSPKRLIYLVSKLDSGVPDRFTGSGSGTDFTLKISRVE | 948 |
| | AEDLGVYYCWQNTHFPQTFGGGTKLEIK | |
| H5S20-19BL | DWVMTQTPLSLSVTIGQPASISCKSSQSLLDSDGKTYLSWLLQRPGQSPKRLIYLVSKLDSGVPDRFTGSGSGTDFTLKISRVE | 949 |
| | AEDLGVYYCWQNTHFPQTFGGGTKLEIK | |
| H5S20-21AL | DVLMTQTPLSLPVSLGDQASISCRSSQSIVHSNGNTYLEWYLQKPGQSPKLLIYKVSNRVSGVPDRFSGSGSGTDFTLKISRV | 950 |
| | EAEDLGVYYCFQGSHVPLTFGAGTKLELK | |
| H5S20-24AL | DWVMTQTPLTLSVTIGQPASISCKSSQSLLDSDGKTYLNWLLQRPGQSPKRLIYLVSKLDSGVPDRFTGSGSGTDFTLKISRVE | 951 |
| | AEDLGVYYCWQNTHFPQTLGGGTKLEIK | |
| H5S20-25AL | DVVMTQTPLTLSVTIGQPASISCKSSQSLLDSDGKTYLNWLLQRPGQSPKRLIYLVSKLDSGVPDRFTGSGSGTDFTLKISRVE | 952 |
| | AEDLGVYYCWQGTHFPQTFGGGTKLEIK | |
| H5S20-26AL | DWVMTQTPLTLSVTIGQPASISCKSSQSLLDSDGKTYLYWLLQRPGQSPKRLIYLVSKLDSGVPDRFTGSGSGTYFTLKISRVE | 953 |
| | AEDLGVYYCWQNTHFPQTFGGGTKLEIK | |
| H5S20-31AL | DVVMTQTPLTLSVTIGQPASISCKSSQSLLDSDGKTYLNWLLQRPGQSPKRLIYLVSKVDSGVPDRFTGSGSGTDFTLKISRVE | 954 |
| | AEDLGVYYCWQNTHFPQTFGGGTKLEIK | |
| H5S20-39AL | DVLMTQTPLSLPVSLGDQVSISCRSSQNIVHSNGNTYLEWYLQKPGQSPKLLIYKVSNRFSGVPDRFSGSGSGTDFTLKISRV | 955 |
| | EAEDLGVYYCFQGSHVPLTFGAGTKLELK | |
| H5S20-3BL | DWVMTQTPLTLSVTIGQPASISCKSSQSLLDSDGKTYLNWLLQRPGQSPKRLIYLVSKLDSGVPDRFTGSGSGTDFTLKISRVE | 956 |
| | AEDLGVYYCWQATHFPQTFGGGTKLEIK | |
| H5S20-41AL | DVVMTQTPLTLSVTIGQPASISCKSSQSLLYSNGKTYLNWLLQRPGQSPKRLIYLVSKLDSGVPDRFTGSGSGTDFTLKISRVE | 957 |
| | AEDLGVYYCVQGTHFPMYTFGGGTKLEIK | |
| H5S20-7AL | DWVMTQTPLTLSVTIGQPASISCKSSQSLLDSDGKTYLNWLLQRPGQSPKRLIYLVSKLDSGVPDRFTGSGSGTDFTLKISRVE | 958 |
| | AEDLGVYYCWQNTHFPQTFGGGTKLEIK | |
| H5S20-7BL | DWVMTQTPLTLSVTIGQPASISCKSSQSLLDSDGKTYLNWLLQRPGQSPKRLIYLVSKLDSGVPDRFTGSGSGTDFTLKISRVE | 959 |
| | AEDLGIYYCWQNTHFPQTFGGGTKLEIK | |
| H5S20-7CL | DWVMTQTPLTLSITIGQPASISCKSSQSLLDSDGKTYLNWLLQRPGQSPKRLIYLVSKLDSGVPDRFTGSGSGTDFTLKISRVE | 960 |
| | AEDLGVYYCWQNTHFPQTFGGGTKLEIK | |
| H5S20-7DL | DWVMTQTPLTLSVTIGQPASISCKSSQSLLDSDGKTYLNWLLQRPGQSPKRLIYLVSKLDSGVPDRFTGSGSGTDFTLKISRVE | 961 |
| | AEDLGVYYCWQNTHFPQTFGGGTELEIK | |
| H5S20-7EL | DVVMTQTPLTLSVTIGQTASISCKSSQSLLDSDGKTYLNWLLQRPGQSPKRLIYLVSKLDSGVPDRFTGSGSGTDFTLKISRVE | 962 |
| | AEDLGVYYCWQNTHFPQTFGGGTKLEIK | |
| H5S20-9AL | DVLMTQTPLSLPVNLGDQASISCRSSQSIVHSNGNTYLEWYLQKPGQSPKLLIYKVSNRFSGVPDRFSGSGSGTDFTLKISRV | 963 |
| | EAEDLGVYYCFQGSHVPLTFGAGTKLELK | |
| H5S20-9DL | DVLMTQTPLSLPVSLGDQASISCRSSQSIVHSNGNTYLEWYLQKPGQSPKLLIYKVSNRFSGVPDRFSGSGSGTDFTLKISRV | 964 |
| | EAEDLGVYYCFQGSHVPLTFGTGTKLELK | |
| H5S20-9EL | DVLMTQTPLSLPVSLGDQASISCRSSQSIVHSNGNTYLEWYLQKPGQSPNLLIYKVSNRFSGVPDRFSGSGSGTDFTLKISRV | 965 |
| | EAEDLGVYYCFQGSHVPLTFGTGTKLELK | |
| ITI_047L | DVVMTQTPLTLSVTIGQPASISCKSSQSLLDSDGKTYLNWLLQRPGQSPKRLIYLVSKLDSGVPDRFTGNGSGTDFTLKISRVE | 966 |
| | AEDLGVYYCWQATHFPQTFGGGTKLEIK | |
| ITI_091L | DVLMTQTPLSLPVSLGDQASISCRSSQSIVHSNGNTYLEWYLQKPGQSPKLLIYKVSNRFSGVPDRFSGSGSGTDFTLNISRV | 967 |
| | EAEDLGVYYCFQGSHVPLTFGAGTKLELK | |
| H5S14-3AL | QIVLTQSPAIMSASLGEEITLTCSASSSVSYMQWYQQKSGTSPKLLIYSTSNLASGVPSRFSGSGSGTFYSLTISSVEAEDAAD | 968 |
| | YYCHQWSSYPTFGGGTELEI | |
| H5S14-5AL | QIVLTQSPAIISASLGEEVTLTCSASSSVSYMHWYQQKSGTSPKLLIYSTSNLASGVPSRFSGSGSGTFYSLTISSVEAEDAAD | 969 |
| | YYCHQWSSYLTFGAGTKLELK | |
| H5S15-8AL | QIVLTQSPAIMSASLGEEITLTCSASSSVSFMHWYQQKSGTSPKLLIYSTSNLASGVPSRFSGSGSGTFYSLTISSVEAEDAAD | 970 |
| | YYCHQWSSYLWTFGGGAKLEIK | |
| H5S19-10AL | QIVLTQSPAIMSASPGEKVTLTCSASSSVDSSYLFWYQQKPGSSPKLWIYSTSNLASGVPARFSGSGSGTSYSLTISSMEAED | 971 |
| | AASYFCHQWSSYPWTFGGGTILEIK | |
| H5S19-10BL | QIVLTQSPAIMSASPGEKVTLTCSASSSVDSSYLFWYQQKPGSSPKLWIYSTSNLASGVPARFSGSGSGTSYSLTISSMEAED | 972 |
| | AASYFCHQWSSYPWTFGGGTILEI | |
| H5S19-14AL | QIVLTQSPAIMSASPGEKVTLTCSASSSVDSSYLFWYQQKPGSSPKLWIYSTSNLASGVPARFSGSGSGTSYYLTLSSMEAED | 973 |
| | AASYFCHQWSNFAWTFGGGTILEIK | |
| H5S19-16AL | QIVLTQSPAIMSASPGEKVTLTCSASSSVDSSYLYWFQQKPGSSPKLWIYGTSNLASGVPARFSGSGSGTSYSLTISSMEAED | 974 |
| | AASYFCHQWNSYPWTFGGGTKLEIK | |
| H5S19-16BL | QIVLTQSPAIMSASPGEKVTLTCSASSSVDSSYLYWYQQKPGSSPKLWIYGTSNLASGVPARFSGSGSGTSYSLTISSMEAED | 975 |
| | AASYFCHQWNSYPWTFGGGTKLEIK | |
| H5S19-18AL | QIVLTQSPAIMSTSPGEKVTLTCSASSSVSSSYLYWYQQKPGSSPKLWIYSTSNLASGVPARFSGSGSGTSYSLTISSMEAED | 976 |
| | AASYFCHQWSTYPWTFGGGTKLEIK | |
| H5S19-19AL | QIVLTQSPAIMSASPGEKVTLTCSASSSVSSSYLYWYQQKPGSSPKLWIYSTSNLASGVPARFSGSGSGTSYSLTISSMEAED | 977 |
| | AASYFCHQWSSYPWTFGGGTKLEIK | |
| H5S19-3AL | QIVLTQSPAIMSASPGEKVTLTCSASSSVDSSYLFWYQQKPGSSPKLWIYSTSNLASGVPARFSGSGSGTSYSLTISSMEAED | 978 |
| | AASYFCHQWNSYPWTFGGGTKLEIK | |
| H5S19-4AL | QIVLTQSPAIMSASPGEKVTLTCSASSSVDSSYLFWYQQKPGSSPKLWIYSTSNLASGVPARFSGSGSGTSYYLTISSMEAED | 979 |
| | AASYFCHQWSSYAWTFGGGTILEIK | |
| H5S19-5AL | QIVLTQSPAIMSASPGEKVTLTCSASSSVDSSYLFWYQQKPGSSPKLWLYSTSNLASGVPARFSGSGSGTSYYLTISSMEAED | 980 |
| | AASYFCHQWSNYAWTFGGGTILEIK | |
| H5S20-10AL | QIVLTQSPAIMSASLGEEITLTCSASSSVSYMHWYQQRSGTSPKLLIYSTSNLASGVPSRFSGSGSGTFYSLTISSVEAEDAAD | 981 |
| | YYCHQWSSYRTFGGGTKLEIK | |
| H5S20-15AL | QIVLTQSPAIMSASLGEEITLTCSASSSVSYMHWYQQKSGTSPKLLIYSASNLASGVPSRFSGSGSGTFYSLTISSVEAEDAAD | 982 |
| | YYCHQWSSYRTFGGGTKLEIK | |
| H5S20-22AL | QIVLTQSPAIMSASLGEEITLTCSASSSVSYMHWYQQKSGSSPKLLIYTTSNLASGVPSRFSGSGSGTFYSLTISSVEAEDAAD | 983 |
| | YYCHQWSSYTWTFGGGTKLEIK | |
| ITI_027L | QIVLTQSPAIMSASPGEKVTLTCSASSSVDSSYLFWYQQKPGSSPKLWIYSTSNLASGVPARFSGSGSGTSYSLTISSMEAED | 984 |
| | AASYFCHQWSSYPWTFGGGTKLEIK | |
| ITI_028L | QIVLTQSPAIMSASPGEKVTLTCSASSSVDSSYLYWYQQKPGSSPKLWIYSTSNLASGVPARFSGSGSGTSYSLTISSMEAED | 985 |
| | AASYFCHQWNSYPWTFGGGTKLEIK | |
| ITI_029L | QIVLTQSPAIMSASPGEKVTLTCSASSSVDSSYLFWYQQKPGSSPKLWIYSTSNLASGVPARFSGSGSGTSYSLTISSMEAED | 986 |
| | AASYFCHQWSSYAWTFGGGTILEIK | |
| ITI_030L | QIVLTQSPAIMSASPGEKVTLTCSASSSVDSSYLYWFQQKPGSSPKLWIYGTSNLASGVPVRFSGSGSGTSYSLTISSMEAED | 987 |
| | AASYFCHQWNSYPWTFGGGTKLEIK | |
| ITI_033L | QIVLTQSPAIMSASPGEKVTLTCSASSSVDSSYLFWYQQKPGSSPKLWIYSTSNLASGVPARFSGSGSGTSYSLTISSMEAED | 988 |
| | AASYFCHQWSSYPWTFGGGTMLEIK | |
| ITI_038L | QIVLTQSPAIMSASPGEKVTLTCSASSSVDSSYLYWYQQKPGSSPKLWIYGTSNLASGVPVRFSGSGSGTSYSLTISSMEAED | 989 |
| | AASYFCHQWNSYPWTFGGGTKLEIK | |
| ITI_127L | QIVLTQSPAIMSASLGEEITLTCSARSSVSYMFWYQQKSGTSPKLLIYTTSNLASGVPSRFSGSGSGTFFSLTISGVEAEDAAD | 990 |
| | YYCHQWSSYTWTFGGGTKLEIK | |
| ITI_128L | QIVLTQSPAIVSASLGAEITLTCSARSTVSYMFWYQQKSGTSPKLLIYSTSNLASGVPSRFSGSGSGTFYSLTISGVEAEDAAD | 991 |
| | YYCHQWSSYTWTFGGGTKLEIK | |
| H5S14-21AL | DIVMSQSPSSLAVSVGEKVTMSCKSSQSLLYSSNQKNYLAWYQQKPGQSPKLLIYWASTRESGVPDRFTGSGSGTDFTLTIS | 992 |
| | SVKAEDLAVYYCQQYYSYPWTFGGGTKLEIK | |
| H5S14-22AL | DIQMTQSPSSLSASLGERVSLTCRASQEISGYLSWLQQKPDGTIKRLIYAASTLDSGVPKRFSGSRSGSDYSLTISSLESEDFA | 993 |
| | DYYCLQYASYPFTFGSGTKLEIK | |
| H5S14-23AL | DIKMTQSPSSMYASLGERVTITCKASQDINSYLSWFQQKPGKSPKTLIYRANRLVDGVPSRFSGSGSGQDYSLTISSLEYEDM | 994 |
| | GIYYCLQYDEFPWTFGGGTKLEIK | |
| H5S15-19AL | QIVLTQSPAIMSASLGERVTLTCTASSSVSSSYLHWYQQKPGSSPKLWIYDTSNLASGVPARFSGSGSGTSYSLTISSMEAED | 995 |
| | AATYYCHQYHRSQWTFGGGTKLEIK | |
| H5S15-21AL | DIVMSQSPSSLAVSVGEKVTMSCKSSQSLLYSSNQKNYLAWYQQKPGQSPKLLIYWASTRESGVPDRFTGSGSGTDFTLTIS | 996 |
| | SVKAEDLAVYYCQQYYSYPYTFGGGTKLEIK | |
| H5S15-26AL | DIVMSQSPSSLAVSVGEKVTMSCKSSQSLLYSSNQKNYLAWYQQKPGQSPKLLIYWASTRESGVPDRFTGSGSGTDFTLTIS | 997 |
| | SVKAEDLAVYYCQQYYSYPRTFGGGTKLEIK | |
| H5S19-15AL | DIKMTQSPSSMYASLGESVTITCKASQDINSYLNWFQQKPGKSPKTLIYRANRLVDGVPSRFSGSGSGQDYSLTISSLEFEDM | 998 |
| | GIYYCLQYDEFPFTFGSGTKLEMK | |
| H5S19-9BL | DIKMTQSPSSMYASLGESVTITCKASQDINSYLSWFQQKPGKSPKTLIYRANRLVDGVPSRFSGSGSGQDYSLTISSLEFEDM | 999 |
| | GIYYCLQYDEFPFTFGSGTKLEMK | |
| H5S20-12AL | DIVMSQSPSSLAVSVGEKVTMSCKSSQSLLYSSNQKNYLAWYQQKPGQSPKLLIYWASTRESGVPDRFTGSGSGTDFTLTIS | 1000 |
| | SVKAEDLAVYYCQQYYSYPFTFGSGTKLEIK | |
| H5S20-12BL | DIVMSQSPSSLAVSVGEKVTMSCKSSQSLLYSSNQKNYLAWYQQRPGQSPKLLIYWASTRESGVPDRFTGSGSGTDFTLTIS | 1001 |
| | SVKAEDLAVYYCQQYYSYPFTFGSGTKLEIK | |
| H5S20-1AL | DIVMSQSPSSLAVSVGEKVTMSCKSSQSLLYSSDQKNYLAWYQQKPGQSPKLLIYWASTRESGVPDRFTGSGSGTDFTLTIS | 1002 |
| | SVKAEDLAVYYCQQYYSYPFTFGSGTKLEIK | |
| H5S20-1BL | DIVMSQSPSSLGVSVGEKVTMSCKSSQSLLYSSDQKNYLAWYQQKPGQSPKLLIYWASTRESGVPDRFTGSGSGTDFTLTIS | 1003 |
| | SVKAEDLAVYYCQQYYSYPFTFGSGTKLEIK | |
| H5S20-27AL | DIVMSQSPSSLAVSVGEKVTMSCKSSQSLLYSSDQKNYLAWYQQKPGQSPKLLIYWASTGESGVPDRFTGSGSGTDFTLTIS | 1004 |
| | SVKAEDLAVYYCQQYYSYPFTFGSGTKLEIK | |
| H5S20-28AL | DIVMSQSPSSLAVSVGEKVTMSCKSSQSLLYSSDQKNYLAWYQQKPGQSPKLLIYWASTRGSGVPDRFTGSGSGTDFTLTIS | 1005 |
| | SVKAEDLAVYYCQQYYSYPFTFGSGTKLEIK | |
| H5S20-29AL | DIVMSQSPSSLAVSVGEKITMSCKSSQSLLFSSNQKNYLAWYQQKPGQSPKLLIYWASTRESGVPDRFTGSGSGTDFTLTISS | 1006 |
| | VKAEDLAVYYCQQYYSYPFTFGSGTKLEIK | |
| H5S20-30AL | DIVMSQSPSSLPVSVGEKVTMTCKSSQSLLYGSNQKNYLAWYQQKPGQSPKLLIYWASTRESGVPDRFTGSGSGTDFTLTIS | 1007 |
| | SVKAEDLAVYYCQQYYSYPFTFGSGTKLEIK | |
| H5S20-33AL | DIVMSQSPSSLAVSVGEKITMSCKSSQSLLFSSNQKNYLAWYQQKPGQSPKLLIYWASTRESGVPDRFTGSGSGTDFTLTISS | 1008 |
| | VKAEDLAVYYCQQYYTYPFTFGSGTKLEMK | |
| H5S20-42AL | DIVMSQSPSSLAVSVGEKITMSCKSSQSLLFGSNQKNYLAWYQQKPGQSPKLLIYWASTRESGVPDRFTGSGSGTDFTLTISS | 1009 |
| | VKAEDLAVYYCQQYYTYPFTFGSGTKLEMK | |
| H5S20-4AL | DIVMSQSPSSLAVSVGEKITMSCKSSQSLLFSSIQKNYLAWYQQKPGQSPKLLVYWASTRESGVPDRFTGSGSGTDFTLTISS | 1010 |
| | VKAEDLAVYYCQQYYSYPFTFGSGTKLEIK | |
| H5S20-6AL | DIVMSQSPSSLAVSVGEKVTMSCKSSQSLLYSSNQKNYLAWYQQKPGQSPKLLIYWSSTRESGVPDRFTGSGSGTDFTLTIS | 1011 |
| | SVKAEDLAVYYCQQYYSYPFTFGSGTKLEIK | |
| ITI_122L | QIVLTQSPAIMSASLGERVTMTCTASSSVSSSYLHWYQQKPGSSPKLWIYNTSNLASGVPARFSGSGSGTSFSLTISSMEAED | 1012 |
| | AATYYCHQYHRSPTFGGGTKLEIK | |
| ITI_173L | DIKMTQSPSSMYASLGESVTITCKASQDINSYLSWFQQKPGKSPKTLIYRANRLVDGVPSRFSGSGSGQDYSLTISSLEFEDM | 1013 |
| | GIYFCLQYDEFPFTFGSGTKLEMK | |
| ITI_203L | DILMTQSPSSMSVSLGDTVNITCHASQGISSNIGWLQQKPGKSFKGLIYHGTNLEDGVPSRFSGSGSGADYSLTISNLESEDF | 1014 |
| | ADYYCGQYGQFPPTFGGGTKLEI | |
| H5S14-10AL | DVVMTQTPLSLPVSLGDQASISCRSSQSLVHSNGNTYLHWYLQKPGQSPKLLIYKVSNRFSGVPDRFSGSGSGTDFTLKISRV | 1015 |
| | EAEDLGVYFCSQSIHVPFTFGSGTKLEIK | |
| H5S14-7AL and | DWVMTQTPLSLPVSLGDQASISCRSSQSLVHSNGNTYLHWYLQKPGQSPKLLIYKVSNRFSGVPDRFSGSGSGTDFTLKISRV | 1016 |
| H5S15-23AL | EAEDLGVYFCSQSTHVPFTFGSGTKLEIK | |
| H5S15-10AL | DVVMTQTPLSLPVSLGDQASISCRSSQSLVHTNGNTYLHWYLQKPGQSPRLLIYKVSNRFSGVPDRFSGGGSGTDFTLKISR | 1017 |
| | VEAEDLGVYFCSQSTHVPTFGSGTKLEIK | |
| H5S15-11AL | DWVMTQTPLSLPVSLGDQASVSCRSSQSLVHSNGNTYLHWYLQKPGQSPKLLIYKVSNRFSGVPDRFIGSGSGTDFTLKISRV | 1018 |
| | EAEDLGVYFCSQSTHVPTFGSGTKLEVK | |
| H5S15-11BL | DWVMTQTPLSLSVSLGDQASISCRSSQSLVHSNGNTYLHWYLQKPGQSPKLLIYKVSNRFSGVPDRFSGSGSGTDFTLKISRV | 1019 |
| | EAEDLGVYFCSQSTHVPTFGSGTKLEIK | |
| H5S15-11CL | DWVMTQTPLSLPVSLGDQASISCRSSQSLVHSNGNTYLHWYLQKPGQSPKLMIYKVSNRFSGVPDRFSGSGSGTDFTLRISR | 1020 |
| | VEAEDLGVYFCSQSTHVPTFGSGTKLEIK | |
| H5S15-11DL | DVVMTQTPLSLPVSLGDQASISCRSSQSLVHSNGNTYLHWYLQKPGQSPKLLIYKVSNRFSGVPDRFSGSGSGTDFTLKISRV | 1021 |
| | EAEDLGVYFCSQSTHVPTFGSGTKLEIK | |
| H5S15-11EL | DVVMTQTPLSLPVSLGDQASISCRSSQSLVHSNGNTYLHWYLQKPGQSPKLLIYKVSNRFSGVPDRFSGSGSGTDFTLKISRV | 1022 |
| | ETEDLGVYFCSQSTHVPTFGSGTKLEIK | |
| H5S15-22AL | DWVMTQTPLSLPVSLGDQASISCRSSQSLVHSNGNTYLHWYLQKPGQSPKLLIYKVSNRFSGVPDRFSGSGSGTDFTLKISRV | 1023 |
| | EAEDLGVYFCSQSTHVPPWTFGGGTKLEIK | |
| H5S14-19AL | DIQMTQSPASLSVSVGETVTITCRASENIYSNLAWYQQKQGKSPQLLVYAATNLADGVPSRFSGSGSGTQYSLKINSLQSEDF | 1024 |
| | GSYYCQHFWGTPRTFGGGTKLEIK | |
| H5S14-9AL | DIQMTQSPASLSASVGETVTITCRASENIYSYLAWYQQKQGKSPQLLVYNAKTLAEGVPSRFSGSGSGTQFSLKINSLQPEDF | 1025 |
| | GSYYCQHHYGTMYTFGGGTKLEIK | |
| H5S15-2AL | DIQMTQSPASLSASVGETVTITCRASENIYSYLAWYQQKQGKSPQLLVYNAKTLAEGVPSRFSGSGSGTQFSLKINSLQPEDF | 1026 |
| | GSYYCQHHYGTYTFGGGTKLEIK | |
| H5S15-32AL | DIQMTQSPASLSASVGETVTITCRASGNIHNYLAWYQQKQGKSPQLLVYNAKTLADGVPSRFSGSGSGTQYSLKINSLQPEDF | 1027 |
| | GSYYCQHFWSTFTFGSGTKLEIK | |
| ITI_023L | DIQMTQSPASLSASVGETVTITCRASGNIHNYLTWYQQKQGKSPQLLVYNAKTLADGVPSRFSGSGSGTQYSLKINNLQPEDF | 1028 |
| | GSYYCQHFWSTFTFGSGTKLEVK | |
| ITI_240L | DIQMTQSPASLSASVGETVTITCRPSENIYSYLAWYQQKQGKSPQLLVYNAKTLAEGVPSRFSGSGSGTHFSLKINSLQPEEF | 1029 |
| | GSYYCQHHYGTPYTFGGGTKLEIK | |
| H5S14-12AL | ETTVTQSPASLSVATGEKVTIRCITSTDIDDDMNWYQQKPGEPPKLLISEGNTLRPGVPSRFSSSGYGTDFVFTIENTLSEDVA | 1030 |
| | DYYCLQSDNMPYTFGGGTKLEIK | |
| H5S19-22AL | DAVMTQTPLSLTVSLGDQASISCRSSQTLENTNGNTYLNWYLQKPGQSPQLLIYRVSNRFSGVLDRFSGSGSGTDFTLKISRV | 1031 |
| | EAEDLGVYFCLQVTHVPYTFGGGTKLEIK | |
| H5S19-24AL | DIVMTQAAFSNPVTLGTSASISCRSSKSLLHSNGITYLYWYLQKPGQSPQLLIYQMSNLASGVPDRFSSSGSGTDFTLRISRVE | 1032 |
| | AEDVGVYYCAQNLELPYTFGGGTKLEIK | |

TABLE 4

| Antibody | FR1 | CDR1 | FR2 | CDR2 | FR3 | CDR3 | FR4 |
|---|---|---|---|---|---|---|---|
| Chain | Seq. IDs | Seq. IDs | Seq. IDs | Seq. IDs | Seq. IDs | Seq. IDs | Seq. IDs |
| Heavy | 202-284 | 285-376 | 377-463 | 464-560 | 561-708 | 709-846 | 847-873 |
| Light | 1033-1098 | 1099-1162 | 1163-1229 | 1230-1261 | 1262-1342 | 1343-1425 | 1426-1449 |

[0140] The anti-HVEM antibodies were raised against amino acids 59-240 (i.e., the extracellular domain) of the human HVEM protein.

[0141] Thus, the invention provides the disclosed antibodies comprising an amino acid sequence of any one of SEQ ID NOS: referred to Tables 2-3. In particular, the present invention encompasses antibodies that immunospecifically bind to a HVEM polypeptide, a polypeptide fragment or variant, or an epitope of HVEM expressed on human monocytes as determined by immunoassays known in the art for assaying specific antibody-antigen binding. The sequences described in the each of Tables 2-3 can be used to construct the antibodies as described herein.

[0142] Variants of the anti-HVEM antibodies described herein are also contemplated. These antibody variants have at least 60%, at least 70%, at least 75%, at least 80%, at least 85%, at least 90%, at least 91%, at least 92%, at least 93%, at least 94%, at least 95%, at least 96%, at least 97%, at least 98%, or at least 99% amino acid sequence identity to any of the amino acid sequences identified in Tables 2 and/or 3. These variant antibodies must retain the ability to bind to HVEM. In preferred embodiments, the variants comprise the CDRs described in Table 2.

[0143] Polynucleotides encoding any anti-HVEM antibodies described herein (including the variants described in the previous paragraph) are preferred embodiments of the invention, along with polynucleotides at least about 60%, at least about 70%, at least about 75%, at least about 80%, at least 85%, at least 90%, at least 91%, at least 92%, at least 93%, at least 94%, at least 95%, at least 96%, at least 97%, at least 98%, or at least 99% amino acid sequence identity to a polynucleotide encoding an anti-HVEM antibody as described herein (including variants).

[0144] In particular embodiments, anti-HVEM antibodies comprise a heavy chain comprising VH CDR1, VH CDR2, and VH CDR3 comprising, respectively: SEQ ID Nos 285, 464, and 709 (consensus cluster 11); SEQ ID Nos 298, 470, and 720 (consensus cluster 20); SEQ ID Nos 304, 478, and 729 (consensus cluster 5); SEQ ID Nos 310, 481, and 733 (consensus cluster 23); SEQ ID Nos 321, 495, and 751 (consensus cluster 21); SEQ ID Nos 328, 504, and 753 (consensus cluster 10); SEQ ID Nos 336, 513, and 776 (consensus cluster 8); SEQ ID Nos 340, 514, and 783 (consensus cluser 15); SEQ ID Nos 347, 522, and 795 (consensus cluster 19); SEQ ID Nos 351, 525, and 801 (consensus cluster 14); SEQ ID Nos 355, 530, and 808 (consensus cluster 6); SEQ ID Nos 356, 531, and 811 (consensus cluster 12); SEQ ID Nos 358, 535, and 815 (consensus cluster 4); SEQ ID Nos 361, 538, and 816 (consensus cluster 9); SEQ ID Nos 364, 541, and 821 (consensus cluster 17); SEQ ID Nos 366, 544, and 826 (consensus cluster 7); SEQ ID Nos 367, 547, and 829 (consensus cluster 13); SEQ ID Nos 369, 550, and 833 (consensus cluster 18); SEQ ID Nos 371, 553, and 837 (consensus cluster 22); SEQ ID Nos 374, 557, and 841 (consensus cluster 16); SEQ ID Nos 338, 513, and 844 (consensus cluster 1); SEQ ID Nos 375, 559, and 845 (consensus cluster 2); or SEQ ID Nos 376, 560, and 846 (consensus cluster 3). In particular embodiments, anti-HVEM antibodies comprise a light chain comprising VL CDR1, VL CDR2, and VL CDR3 comprising, respectively: SEQ ID Nos 1099, 1230, and 1343 (consensus cluster 6); SEQ ID Nos 1129, 1246, and 1376 (consensus cluster 7); SEQ ID Nos 1136, 1249, and 1387 (consensus cluster 3); SEQ ID Nos 1142, 1251, and 1399 (consensus cluster 5); SEQ ID Nos 1152, 1248, and 1411 (consensus cluster 1); SEQ ID Nos 1155, 1256, and 1416 (consensus cluster 4); and SEQ ID Nos 1159, 1258, and 1422 (consensus cluster 2).

[0145] In further embodiments, anti-HVEM antibodies comprise both a heavy hain comprising VH CDR1, VH CDR2, and VH CDR3 comprising, respectively: SEQ ID Nos 285, 464, and 709 (consensus cluster 11); SEQ ID Nos 298, 470, and 720 (consensus cluster 20); SEQ ID Nos 304, 478, and 729 (consensus cluster 5); SEQ ID Nos 310, 481, and 733 (consensus cluster 23); SEQ ID Nos 321, 495, and 751 (consensus cluster 21); SEQ ID Nos 328, 504, and 753 (consensus cluster 10); SEQ ID Nos 336, 513, and 776 (consensus cluster 8); SEQ ID Nos 340, 514, and 783 (consensus cluser 15); SEQ ID Nos 347, 522, and 795 (consensus cluster 19); SEQ ID Nos 351, 525, and 801 (consensus cluster 14); SEQ ID Nos 355, 530, and 808 (consensus cluster 6); SEQ ID Nos 356, 531, and 811 (consensus cluster 12); SEQ ID Nos 358, 535, and 815 (consensus cluster 4); SEQ ID Nos 361, 538, and 816 (consensus cluster 9); SEQ ID Nos 364, 541, and 821 (consensus cluster 17); SEQ ID Nos 366, 544, and 826 (consensus cluster 7); SEQ ID Nos 367, 547, and 829 (consensus cluster 13); SEQ ID Nos 369, 550, and 833 (consensus cluster 18); SEQ ID Nos 371, 553, and 837 (consensus cluster 22); SEQ ID Nos 374, 557, and 841 (consensus cluster 16); SEQ ID Nos 338, 513, and 844 (consensus cluster 1); SEQ ID Nos 375, 559, and 845 (consensus cluster 2); or SEQ ID Nos 376, 560, and 846 (consensus cluster 3), and further comprise a light chain comprising VL CDR1, VL CDR2, and VL CDR3 comprising, respectively: SEQ ID Nos 1099, 1230, and 1343 (consensus cluster 6); SEQ ID Nos 1129, 1246, and 1376 (consensus cluster 7); SEQ ID Nos 1136, 1249, and 1387 (consensus cluster 3); SEQ ID Nos 1142, 1251, and 1399 (consensus cluster 5); SEQ ID Nos 1152, 1248, and 1411 (consensus cluster 1); SEQ ID Nos 1155, 1256, and 1416 (consensus cluster 4); and SEQ ID Nos 1159, 1258, and 1422 (consensus cluster 2). In some embodiments, the antibody further comprises at least the VH FR2 and VH FR3 corresponding to the consensus cluster of the VH CDRs listed above. And in some embodiments, the antibody further comprises the VH FR1, VH, FR2, VH FR3, and FH FR4 corresponding to the consensus cluster of the VH CDRs listed above (i.e., SEQ ID Nos 202, 377, 561, and 847 in the case of consensus cluster 11). In some embodiments, the antibody further comprises at least the VL FR2 and VL FR3 corresponding to the consensus cluster of the VL CDRs listed above. And in some embodiments, the antibody further comprises the VL FR1, VL, FR2, VL FR3, and FL FR4 corresponding to the consensus cluster of the VL CDRs listed above (i.e., SEQ ID Nos 1033, 1163, 1262, and 1426 in the case of consensus cluster 6).

[0146] In some embodiments, the anti-HVEM antibody comprises VH CDR1, VH CDR2, and VH CDR3 of an antibody listed in Table 1 herein. In some embodiments, the anti-HVEM antibody comprises VL CDR1, VLCDR2, and VL CDR3 of an antibody listed in Table 1 herein. In some embodiments, the anti-HVEM antibody comprises VH CDR1, VH CDR2, and VH CDR3 and the VL CDR1, VL CDR2, and VL CDR3 of an antibody listed in Table 1 herein.

[0147] In some embodiments, the anti-HVEM antibody comprises the VH CDR1, VH CDR2, and VH CDR3 and the VL CDR1, VH CDR2, and VH CDR3 of any one of antibodies Ab_001 (H5S14-1A1A) (i.e., SEQ ID Nos. 370, 551, 834, 1102, 1234, and 1346, respectively), Ab_006, Ab_008, Ab_009, Ab_010, Ab_011, Ab_012, Ab_013, Ab_025, Ab_026, Ab_027, Ab_028, Ab_029, Ab_030, Ab_031, Ab_034, Ab_035, Ab_036, Ab_043, Ab_044, Ab_045, Ab_046, Ab_050, Ab_051, Ab_058, Ab_063, Ab_159, Ab_064, Ab_065, Ab_066, Ab_067, Ab_068, Ab_069, Ab_155, Ab_070, Ab_071, Ab_149, Ab_072, Ab_073, Ab_074, Ab_078, Ab_079, Ab_080, Ab_083, Ab_153, or Ab_087. In some embodiments, the anti-HVEM antibody comprises the VH CDR1, VH CDR2, and VH CDR3 and the VL CDR1, VH CDR2, and VH CDR3 of any one of antibodies Ab_001 (H5S14-1A1A) (i.e., SEQ ID Nos. 370, 551, 834, 1102, 1234, and 1346, respectively), Ab_006, Ab_008, Ab_009, Ab_010, Ab_011, Ab_012, Ab_013, Ab_025, Ab_026, Ab_027, Ab_028, Ab_029, Ab_030, Ab_031, Ab_034, Ab_035, Ab_036, Ab_043, Ab_044, Ab_045, Ab_046, Ab_050, Ab_051, Ab_058, Ab_063, Ab_159, Ab_064, Ab_065, Ab_066, Ab_067, Ab_068, Ab_069, Ab_155, Ab_070, Ab_071, Ab_149, Ab_072, Ab_073, Ab_074, Ab_078, Ab_079, Ab_080, Ab_083, Ab_153, or Ab_087, and further comprises a VH region with an amino acid sequence that is at least 90%, at least 95%, at least 97%, or at least 99% identical to that of the VH of the corresponding Ab_001, Ab_006, Ab_008, Ab_009, Ab_010, Ab_011, Ab_012, Ab_013, Ab_025, Ab_026, Ab_027, Ab_028, Ab_029, Ab_030, Ab_031, Ab_034, Ab_035, Ab_036, Ab_043, Ab_044, Ab_045, Ab_046, Ab_050, Ab_051, Ab_058, Ab_063, Ab_159, Ab_064, Ab_065, Ab_066, Ab_067, Ab_068, Ab_069, Ab_155, Ab_070, Ab_071, Ab_149, Ab_072, Ab_073, Ab_074, Ab_078, Ab_079, Ab_080, Ab_083, Ab_153, or Ab_087 antibody, and/or further comprises a VL region with an amino acid sequence that is at least 90%, at least 95%, at least 97%, or at least 99% identical to that of the VL of the corresponding Ab_001, Ab_006, Ab_008, Ab_009, Ab_010, Ab_011, Ab_012, Ab_013, Ab_025, Ab_026, Ab_027, Ab_028, Ab_029, Ab_030, Ab_031, Ab_034, Ab_035, Ab_036, Ab_043, Ab_044, Ab_045, Ab_046, Ab_050, Ab_051, Ab_058, Ab_063, Ab_159, Ab_064, Ab_065, Ab_066, Ab_067, Ab_068, Ab_069, Ab_155, Ab_070, Ab_071, Ab_149, Ab_072, Ab_073, Ab_074, Ab_078, Ab_079, Ab_080, Ab_083, Ab_153, or Ab_087 antibody. (For example, in the case of Ab_001, the antibody comprises CDRs comprising SEQ ID Nos. 370, 551, 834, 1102, 1234, and 1346, respectively, and a VH comprising an amino acid sequence at least 80%, at least 90%, at least 95%, at least 97%, at least 98%, or at least 99% identical to that of SEQ ID No. 191 (H5S14-1AH of Ab_001), and or comprises a VL comprising an amino acid sequence at least 80%, at least 90%, at least 95%, at least 97%, at least 98%, or at least 99% identical to that of SEQ ID No. 877 (H5S14-1AL of Ab_001). In some embodiments, the anti-HVEM antibody comprises the VH CDR1, VH CDR2, and VH CDR3 and the VL CDR1, VH CDR2, and VH CDR3 of any one of antibodies Ab_001 (H5S14-1A1A) (i.e., SEQ ID Nos. 370, 551, 834, 1102, 1234, and 1346, respectively), Ab_006, Ab_008, Ab_009, Ab_010, Ab_011, Ab_012, Ab_013, Ab_025, Ab_026, Ab_027, Ab_028, Ab_029, Ab_030, Ab_031, Ab_034, Ab_035, Ab_036, Ab_043, Ab_044, Ab_045, Ab_046, Ab_050, Ab_051, Ab_058, Ab_063, Ab_159, Ab_064, Ab_065, Ab_066, Ab_067, Ab_068, Ab_069, Ab_155, Ab_070, Ab_071, Ab_149, Ab_072, Ab_073, Ab_074, Ab_078, Ab_079, Ab_080, Ab_083, Ab_153, or Ab_087, and further comprises a VH and a VL region, each with an amino acid sequence that is at least 80%, at least 90%, at least 95%, at least 97%, at least 98%, or at least 99% identical to that of the VH and/or the VL of the corresponding Ab_001, Ab_006, Ab_008, Ab_009, Ab_010, Ab_011, Ab_012, Ab_013, Ab_025, Ab_026, Ab_027, Ab_028, Ab_029, Ab_030, Ab_031, Ab_034, Ab_035, Ab_036, Ab_043, Ab_044, Ab_045, Ab_046, Ab_050, Ab_051, Ab_058, Ab_063, Ab_159, Ab_064, Ab_065, Ab_066, Ab_067, Ab_068, Ab_069, Ab_155, Ab_070, Ab_071, Ab_149, Ab_072, Ab_073, Ab_074, Ab_078, Ab_079, Ab_080, Ab_083, Ab_153, or Ab_087 antibody. In some embodiments, the antibody comprises both the VH and the VL region of the Ab_001, Ab_006, Ab_008, Ab_009, Ab_010, Ab_011, Ab_012, Ab_013, Ab_025, Ab_026, Ab_027, Ab_028, Ab_029, Ab_030, Ab_031, Ab_034, Ab_035, Ab_036, Ab_043, Ab_044, Ab_045, Ab_046, Ab_050, Ab_051, Ab_058, Ab_063, Ab_159, Ab_064, Ab_065, Ab_066, Ab_067, Ab_068, Ab_069, Ab_155, Ab_070, Ab_071, Ab_149, Ab_072, Ab_073, Ab_074, Ab_078, Ab_079, Ab_080, Ab_083, Ab_153, or Ab_087 antibody. In some embodiments above, the antibody binds to HVEM with a K_{D} of 100 nM or less, 50 nM or less, or 10 nM or less (i.e. 1E-07 or less, 5E-08 or less, or 1E-08 or less) (e.g., as determined in a bio-layer interferometry (BLI) assay such as Biacore® or OctetRed®). In some embodiments, above, the antibody also binds to cynomolgus monkey HVEM. In some embodiments above, the antibody blocks binding of human BTLA to human HVEM and/or blocks binding of human LIGHT to human HVEM.

[0148] In some embodiments, the anti-HVEM antibody blocks binding of human BTLA to human HVEM with an IC50 of 10 nM or less (e.g. in a competitive binding assay as described in the Examples herein). In some such cases, the anti-HVEM antibody comprises the VH CDR1, VH CDR2, VH CDR3, VL CDR1, VL CDR2, and VL CDR3 of Ab_001, Ab_008, Ab_009, Ab_025, Ab_026, Ab_027, Ab_028, Ab_029, Ab_034, Ab_035, Ab_036, Ab_043, Ab_050, Ab_051, Ab_058, Ab_063, Ab_159, Ab_064, Ab_065, Ab_066, Ab_072, Ab_073, Ab_074, Ab_078, Ab_080, Ab_083, Ab_153, or Ab_087. In some embodiments, the anti-HVEM antibody comprises the VH CDR1, VH CDR2, and VH CDR3 and the VL CDR1, VH CDR2, and VH CDR3 of any one of antibodies Ab_001, Ab_008, Ab_009, Ab_025, Ab_026, Ab_027, Ab_028, Ab_029, Ab_034, Ab_035, Ab_036, Ab_043, Ab_050, Ab_051, Ab_058, Ab_063, Ab_159, Ab_064, Ab_065, Ab_066, Ab_072, Ab_073, Ab_074, Ab_078, Ab_080, Ab_083, Ab_153, or Ab_087, and further comprises a VH region with an amino acid sequence that is at least 90%, at least 95%, at least 97%, or at least 99% identical to that of the VH of the corresponding Ab_001, Ab_008, Ab_009, Ab_025, Ab_026, Ab_027, Ab_028, Ab_029, Ab_034, Ab_035, Ab_036, Ab_043, Ab_050, Ab_051, Ab_058, Ab_063, Ab_159, Ab_064, Ab_065, Ab_066, Ab_072, Ab_073, Ab_074, Ab_078, Ab_080, Ab_083, Ab_153, or Ab_087 antibody, and/or further comprises a VL region with an amino acid sequence that is at least 90%, at least 95%, at least 97%, or at least 99% identical to that of the VL of the corresponding Ab_001, Ab_008, Ab_009, Ab_025, Ab_026, Ab_027, Ab_028, Ab_029, Ab_034, Ab_035, Ab_036, Ab_043, Ab_050, Ab_051, Ab_058, Ab_063, Ab_159, Ab_064, Ab_065, Ab_066, Ab_072, Ab_073, Ab_074, Ab_078, Ab_080, Ab_083, Ab_153, or Ab_087 antibody. In some embodiments, the anti-HVEM antibody comprises the VH CDR1, VH CDR2, and VH CDR3 and the VL CDR1, VH CDR2, and VH CDR3 of any one of antibodies Ab_001, Ab_008, Ab_009, Ab_025, Ab_026, Ab_027, Ab_028, Ab_029, Ab_034, Ab_035, Ab_036, Ab_043, Ab_050, Ab_051, Ab_058, Ab_063, Ab_159, Ab_064, Ab_065, Ab_066, Ab_072, Ab_073, Ab_074, Ab_078, Ab_080, Ab_083, Ab_153, or Ab_087, and further comprises a VH and a VL region, each with an amino acid sequence that is at least 90%, at least 95%, at least 97%, or at least 99% identical to that of the VH of the corresponding Ab_001, Ab_008, Ab_009, Ab_025, Ab_026, Ab_027, Ab_028, Ab_029, Ab_034, Ab_035, Ab_036, Ab_043, Ab_050, Ab_051, Ab_058, Ab_063, Ab_159, Ab_064, Ab_065, Ab_066, Ab_072, Ab_073, Ab_074, Ab_078, Ab_080, Ab_083, Ab_153, or Ab_087 antibody. In some embodiments, the antibody comprises both the VH and the VL region of the Ab_001, Ab_008, Ab_009, Ab_025, Ab_026, Ab_027, Ab_028, Ab_029, Ab_034, Ab_035, Ab_036, Ab_043, Ab_050, Ab_051, Ab_058, Ab_063, Ab_159, Ab_064, Ab_065, Ab_066, Ab_072, Ab_073, Ab_074, Ab_078, Ab_080, Ab_083, Ab_153, or Ab_087 antibody. In some embodiments, the anti-HVEM antibody blocks binding of human BTLA to human HVEM with an IC50 of 3 nM or less (e.g. in a competitive binding assay as described in the Examples herein), or of 2 nM or less.

[0149] In some embodiments, the anti-HVEM antibody blocks binding of human LIGHT to human HVEM with an IC50 of 30 nM or less (e.g. in a competitive binding assay as described in the Examples herein). In some such cases, the anti-HVEM antibody comprises the VH CDR1, VH CDR2, VH CDR3, VL CDR1, VL CDR2, and VL CDR3 of Ab_006, Ab_011, Ab_012, Ab_013, Ab_030, Ab_031, Ab_036, Ab_043, Ab_045, Ab_046, Ab_051, Ab_063, Ab_159, Ab_064, Ab_065, Ab_066, Ab_067, Ab_068, Ab_069, Ab_155, Ab_070, Ab_071, Ab_149, or Ab_078. In some embodiments, the anti-HVEM antibody comprises the VH CDR1, VH CDR2, and VH CDR3 and the VL CDR1, VH CDR2, and VH CDR3 of any one of antibodies Ab_006, Ab_011, Ab_012, Ab_013, Ab_030, Ab_031, Ab_036, Ab_043, Ab_045, Ab_046, Ab_051, Ab_063, Ab_159, Ab_064, Ab_065, Ab_066, Ab_067, Ab_068, Ab_069, Ab_155, Ab_070, Ab_071, Ab_149, or Ab_078, and further comprises a VH region with an amino acid sequence that is at least 90%, at least 95%, at least 97%, or at least 99% identical to that of the VH of the corresponding Ab_006, Ab_011, Ab_012, Ab_013, Ab_030, Ab_031, Ab_036, Ab_043, Ab_045, Ab_046, Ab_051, Ab_063, Ab_159, Ab_064, Ab_065, Ab_066, Ab_067, Ab_068, Ab_069, Ab_155, Ab_070, Ab_071, Ab_149, or Ab_078 antibody, and/or further comprises a VL region with an amino acid sequence that is at least 90%, at least 95%, at least 97%, or at least 99% identical to that of the VL of the corresponding Ab_006, Ab_011, Ab_012, Ab_013, Ab_030, Ab_031, Ab_036, Ab_043, Ab_045, Ab_046, Ab_051, Ab_063, Ab_159, Ab_064, Ab_065, Ab_066, Ab_067, Ab_068, Ab_069, Ab_155, Ab_070, Ab_071, Ab_149, or Ab_078 antibody. In some embodiments, the anti-HVEM antibody comprises the VH CDR1, VH CDR2, and VH CDR3 and the VL CDR1, VH CDR2, and VH CDR3 of any one of antibodies Ab_006, Ab_011, Ab_012, Ab_013, Ab_030, Ab_031, Ab_036, Ab_043, Ab_045, Ab_046, Ab_051, Ab_063, Ab_159, Ab_064, Ab_065, Ab_066, Ab_067, Ab_068, Ab_069, Ab_155, Ab_070, Ab_071, Ab_149, or Ab_078, and further comprises a VH and a VL region, each with an amino acid sequence that is at least 90%, at least 95%, at least 97%, or at least 99% identical to that of the VH of the corresponding Ab_006, Ab_011, Ab_012, Ab_013, Ab_030, Ab_031, Ab_036, Ab_043, Ab_045, Ab_046, Ab_051, Ab_063, Ab_159, Ab_064, Ab_065, Ab_066, Ab_067, Ab_068, Ab_069, Ab_155, Ab_070, Ab_071, Ab_149, or Ab_078 antibody. In some embodiments, the antibody comprises both the VH and the VL region of the Ab_006, Ab_011, Ab_012, Ab_013, Ab_030, Ab_031, Ab_036, Ab_043, Ab_045, Ab_046, Ab_051, Ab_063, Ab_159, Ab_064, Ab_065, Ab_066, Ab_067, Ab_068, Ab_069, Ab_155, Ab_070, Ab_071, Ab_149, or Ab_078 antibody.

[0150] In some embodiments, the anti-HVEM antibody blocks binding of human LIGHT to human HVEM with an IC50 of 20 nM or less (e.g. in a competitive binding assay as described in the Examples herein), or of 10 nM or less.

[0151] In some embodiments, the antibody blocks binding of human BTLA to human HVEM with an IC50 of 10 nM or less, and also blocks binding of human LIGHT to human HVEM with an IC50 of 100 nM or less. In some such cases, the anti-HVEM antibody comprises the VH CDR1, VH CDR2, VH CDR3, VL CDR1, VL CDR2, and VL CDR3 of Ab_036, Ab_051, Ab_063, Ab_159, Ab_064, Ab_065, Ab_066, Ab_078, or Ab_080. In some embodiments, the anti-HVEM antibody comprises the VH CDR1, VH CDR2, and VH CDR3 and the VL CDR1, VH CDR2, and VH CDR3 of any one of antibodies Ab_036, Ab_051, Ab_063, Ab_159, Ab_064, Ab_065, Ab_066, Ab_078, or Ab_080, and further comprises a VH region with an amino acid sequence that is at least 90%, at least 95%, at least 97%, or at least 99% identical to that of the VH of the corresponding Ab_036, Ab_051, Ab_063, Ab_159, Ab_064, Ab_065, Ab_066, Ab_078, or Ab_080 antibody, and/or further comprises a VL region with an amino acid sequence that is at least 90%, at least 95%, at least 97%, or at least 99% identical to that of the VL of the corresponding Ab_036, Ab_051, Ab_063, Ab_159, Ab_064, Ab_065, Ab_066, Ab_078, or Ab_080 antibody. In some embodiments, the anti-HVEM antibody comprises the VH CDR1, VH CDR2, and VH CDR3 and the VL CDR1, VH CDR2, and VH CDR3 of any one of antibodies Ab_036, Ab_051, Ab_063, Ab_159, Ab_064, Ab_065, Ab_066, Ab_078, or Ab_080, and further comprises a VH and a VL region, each with an amino acid sequence that is at least 90%, at least 95%, at least 97%, or at least 99% identical to that of the VH of the corresponding Ab_036, Ab_051, Ab_063, Ab_159, Ab_064, Ab_065, Ab_066, Ab_078, or Ab_080 antibody. In some embodiments, the antibody comprises both the VH and the VL region of the Ab_036, Ab_051, Ab_063, Ab_159, Ab_064, Ab_065, Ab_066, Ab_078, or Ab_080 antibody.

[0152] In some embodiments, the antibody blocks binding of human BTLA to human HVEM with an IC50 of 10 nM or less, and also blocks binding of human LIGHT to human HVEM with a higher IC50 as compared to the IC50 for the BTLA competitive binding experiment. In some such cases, the anti-HVEM antibody comprises the VH CDR1, VH CDR2, VH CDR3, VL CDR1, VL CDR2, and VL CDR3 of Ab_001, Ab_043, Ab_050, Ab_051, Ab_066, Ab_072, Ab_078, or Ab_080. In some embodiments, the anti-HVEM antibody comprises the VH CDR1, VH CDR2, and VH CDR3 and the VL CDR1, VH CDR2, and VH CDR3 of any one of antibodies Ab_001, Ab_043, Ab_050, Ab_051, Ab_066, Ab_072, Ab_078, or Ab_080, and further comprises a VH region with an amino acid sequence that is at least 90%, at least 95%, at least 97%, or at least 99% identical to that of the VH of the corresponding Ab_001, Ab_043, Ab_050, Ab_051, Ab_066, Ab_072, Ab_078, or Ab_080 antibody, and/or further comprises a VL region with an amino acid sequence that is at least 90%, at least 95%, at least 97%, or at least 99% identical to that of the VL of the corresponding Ab_001, Ab_043, Ab_050, Ab_051, Ab_066, Ab_072, Ab_078, or Ab_080 antibody. In some embodiments, the anti-HVEM antibody comprises the VH CDR1, VH CDR2, and VH CDR3 and the VL CDR1, VH CDR2, and VH CDR3 of any one of antibodies Ab_001, Ab_043, Ab_050, Ab_051, Ab_066, Ab_072, Ab_078, or Ab_080, and further comprises a VH and a VL region, each with an amino acid sequence that is at least 90%, at least 95%, at least 97%, or at least 99% identical to that of the VH of the corresponding Ab_001, Ab_043, Ab_050, Ab_051, Ab_066, Ab_072, Ab_078, or Ab_080 antibody. In some embodiments, the antibody comprises both the VH and the VL region of the Ab_001, Ab_043, Ab_050, Ab_051, Ab_066, Ab_072, Ab_078, or Ab_080 antibody.

[0153] In some embodiments, the antibody binds to cynomolgus monkey HVEM as well as to human HVEM (e.g. via an ELISA assay as described herein or via a BLI assay as described herein). In some such cases, the anti-HVEM antibody comprises the VH CDR1, VH CDR2, VH CDR3, VL CDR1, VL CDR2, and VL CDR3 of Ab_002, Ab_003, Ab_006, Ab_008, Ab_009, Ab_011, Ab_012, Ab_013, Ab_025, Ab_028, Ab_030, Ab_031, Ab_032, Ab_33, Ab_039, Ab_045, Ab_046, Ab_052, Ab_053, Ab_054, Ab_055, Ab_060, Ab_061, Ab_062, Ab_063, Ab_065, Ab_067, Ab_068, Ab_069, Ab_070, Ab_071, Ab_075, Ab_076, or Ab_080. In some embodiments, the anti-HVEM antibody comprises the VH CDR1, VH CDR2, and VH CDR3 and the VL CDR1, VH CDR2, and VH CDR3 of any one of antibodies Ab_002, Ab_003, Ab_006, Ab_008, Ab_009, Ab_011, Ab_012, Ab_013, Ab_025, Ab_028, Ab_030, Ab_031, Ab_032, Ab_33, Ab_039, Ab_045, Ab_046, Ab_052, Ab_053, Ab_054, Ab_055, Ab_060, Ab_061, Ab_062, Ab_063, Ab_065, Ab_067, Ab_068, Ab_069, Ab_070, Ab_071, Ab_075, Ab_076, or Ab_080, and further comprises a VH region with an amino acid sequence that is at least 90%, at least 95%, at least 97%, or at least 99% identical to that of the VH of the corresponding Ab_002, Ab_003, Ab_006, Ab_008, Ab_009, Ab_011, Ab_012, Ab_013, Ab_025, Ab_028, Ab_030, Ab_031, Ab_032, Ab_33, Ab_039, Ab_045, Ab_046, Ab_052, Ab_053, Ab_054, Ab_055, Ab_060, Ab_061, Ab_062, Ab_063, Ab_065, Ab_067, Ab_068, Ab_069, Ab_070, Ab_071, Ab_075, Ab_076, or Ab_080 antibody, and/or further comprises a VL region with an amino acid sequence that is at least 90%, at least 95%, at least 97%, or at least 99% identical to that of the VL of the corresponding Ab_002, Ab_003, Ab_006, Ab_008, Ab_009, Ab_011, Ab_012, Ab_013, Ab_025, Ab_028, Ab_030, Ab_031, Ab_032, Ab_33, Ab_039, Ab_045, Ab_046, Ab_052, Ab_053, Ab_054, Ab_055, Ab_060, Ab_061, Ab_062, Ab_063, Ab_065, Ab_067, Ab_068, Ab_069, Ab_070, Ab_071, Ab_075, Ab_076, or Ab_080 antibody. In some embodiments, the anti-HVEM antibody comprises the VH CDR1, VH CDR2, and VH CDR3 and the VL CDR1, VH CDR2, and VH CDR3 of any one of antibodies Ab_002, Ab_003, Ab_006, Ab_008, Ab_009, Ab_011, Ab_012, Ab_013, Ab_025, Ab_028, Ab_030, Ab_031, Ab_032, Ab_33, Ab_039, Ab_045, Ab_046, Ab_052, Ab_053, Ab_054, Ab_055, Ab_060, Ab_061, Ab_062, Ab_063, Ab_065, Ab_067, Ab_068, Ab_069, Ab_070, Ab_071, Ab_075, Ab_076, or Ab_080, and further comprises a VH and a VL region, each with an amino acid sequence that is at least 90%, at least 95%, at least 97%, or at least 99% identical to that of the VH of the corresponding Ab_002, Ab_003, Ab_006, Ab_008, Ab_009, Ab_011, Ab_012, Ab_013, Ab_025, Ab_028, Ab_030, Ab_031, Ab_032, Ab_33, Ab_039, Ab_045, Ab_046, Ab_052, Ab_053, Ab_054, Ab_055, Ab_060, Ab_061, Ab_062, Ab_063, Ab_065, Ab_067, Ab_068, Ab_069, Ab_070, Ab_071, Ab_075, Ab_076, or Ab_080 antibody. In some embodiments, the antibody comprises both the VH and the VL region of the Ab_002, Ab_003, Ab_006, Ab_008, Ab_009, Ab_011, Ab_012, Ab_013, Ab_025, Ab_028, Ab_030, Ab_031, Ab_032, Ab_33, Ab_039, Ab_045, Ab_046, Ab_052, Ab_053, Ab_054, Ab_055, Ab_060, Ab_061, Ab_062, Ab_063, Ab_065, Ab_067, Ab_068, Ab_069, Ab_070, Ab_071, Ab_075, Ab_076, or Ab_080 antibody.

[0154] In some embodiments, the antibody binds to cynomolgus monkey HVEM as well as to human HVEM (e.g. via an ELISA assay as described herein or via a BLI assay as described herein) and also blocks binding of human BTLA to human HVEM with an IC50 of 10 nM or less. In some such cases, the anti-HVEM antibody comprises the VH CDR1, VH CDR2, VH CDR3, VL CDR1, VL CDR2, and VL CDR3 of Ab_002, Ab_003, Ab_008, Ab_009, Ab_028, Ab_063, Ab_065, or Ab_080. In some embodiments, the anti-HVEM antibody comprises the VH CDR1, VH CDR2, and VH CDR3 and the VL CDR1, VH CDR2, and VH CDR3 of any one of antibodies Ab_002, Ab_003, Ab_008, Ab_009, Ab_028, Ab_063, Ab_065, or Ab_080, and further comprises a VH region with an amino acid sequence that is at least 90%, at least 95%, at least 97%, or at least 99% identical to that of the VH of the corresponding Ab_002, Ab_003, Ab_008, Ab_009, Ab_028, Ab_063, Ab_065, or Ab_080 antibody, and/or further comprises a VL region with an amino acid sequence that is at least 90%, at least 95%, at least 97%, or at least 99% identical to that of the VL of the corresponding Ab_002, Ab_003, Ab_008, Ab_009, Ab_028, Ab_063, Ab_065, or Ab_080 antibody. In some embodiments, the anti-HVEM antibody comprises the VH CDR1, VH CDR2, and VH CDR3 and the VL CDR1, VH CDR2, and VH CDR3 of any one of antibodies Ab_002, Ab_003, Ab_008, Ab_009, Ab_028, Ab_063, Ab_065, or Ab_080, and further comprises a VH and a VL region, each with an amino acid sequence that is at least 90%, at least 95%, at least 97%, or at least 99% identical to that of the VH of the corresponding Ab_002, Ab_003, Ab_008, Ab_009, Ab_028, Ab_063, Ab_065, or Ab_080 antibody. In some embodiments, the antibody comprises both the VH and the VL region of the Ab_002, Ab_003, Ab_008, Ab_009, Ab_028, Ab_063, Ab_065, or Ab_080 antibody. In some such embodiments, the antibody also detectably blocks the binding of human LIGHT to human HVEM in a competition assay as described herein.

[0155] In some embodiments, the antibody binds to cynomolgus monkey HVEM as well as to human HVEM (e.g. via an ELISA assay as described herein or via a BLI assay as described herein) and also blocks binding of human LIGHT to human HVEM with an IC50 of 30 nM or less. In some such cases, the anti-HVEM antibody comprises the VH CDR1, VH CDR2, VH CDR3, VL CDR1, VL CDR2, and VL CDR3 of Ab_006, Ab_008, Ab_009, Ab_011, Ab_012, Ab_023, Ab_028, Ab_030, Ab_031, Ab_045, Ab_046, Ab_052, Ab_053, Ab_054, Ab_063, Ab_065, Ab_067, Ab_068, Ab_069, Ab_070, Ab_071, or Ab_080. In some embodiments, the anti-HVEM antibody comprises the VH CDR1, VH CDR2, and VH CDR3 and the VL CDR1, VH CDR2, and VH CDR3 of any one of antibodies Ab_002, Ab_003, Ab_008, Ab_009, Ab_028, Ab_063, Ab_065, or Ab_080, and further comprises a VH region with an amino acid sequence that is at least 90%, at least 95%, at least 97%, or at least 99% identical to that of the VH of the corresponding Ab_006, Ab_008, Ab_009, Ab_011, Ab_012, Ab_023, Ab_028, Ab_030, Ab_031, Ab_045, Ab_046, Ab_052, Ab_053, Ab_054, Ab_063, Ab_065, Ab_067, Ab_068, Ab_069, Ab_070, Ab_071, or Ab_080 antibody, and/or further comprises a VL region with an amino acid sequence that is at least 90%, at least 95%, at least 97%, or at least 99% identical to that of the VL of the corresponding Ab_006, Ab_008, Ab_009, Ab_011, Ab_012, Ab_023, Ab_028, Ab_030, Ab_031, Ab_045, Ab_046, Ab_052, Ab_053, Ab_054, Ab_063, Ab_065, Ab_067, Ab_068, Ab_069, Ab_070, Ab_071, or Ab_080 antibody. In some embodiments, the anti-HVEM antibody comprises the VH CDR1, VH CDR2, and VH CDR3 and the VL CDR1, VH CDR2, and VH CDR3 of any one of antibodies Ab_006, Ab_008, Ab_009, Ab_011, Ab_012, Ab_023, Ab_028, Ab_030, Ab_031, Ab_045, Ab_046, Ab_052, Ab_053, Ab_054, Ab_063, Ab_065, Ab_067, Ab_068, Ab_069, Ab_070, Ab_071, or Ab_080, and further comprises a VH and a VL region, each with an amino acid sequence that is at least 90%, at least 95%, at least 97%, or at least 99% identical to that of the VH of the corresponding Ab_006, Ab_008, Ab_009, Ab_011, Ab_012, Ab_023, Ab_028, Ab_030, Ab_031, Ab_045, Ab_046, Ab_052, Ab_053, Ab_054, Ab_063, Ab_065, Ab_067, Ab_068, Ab_069, Ab_070, Ab_071, or Ab_080 antibody. In some embodiments, the antibody comprises both the VH and the VL region of the Ab_006, Ab_008, Ab_009, Ab_011, Ab_012, Ab_023, Ab_028, Ab_030, Ab_031, Ab_045, Ab_046, Ab_052, Ab_053, Ab_054, Ab_063, Ab_065, Ab_067, Ab_068, Ab_069, Ab_070, Ab_071, or Ab_080 antibody.

### Anti-HVEM Antibody Expression

[0156] Procedures for constructing the anti-HVEM antibodies as described herein are well known in the art (see e.g., Williams, et al., J. Cell Biol. 111: 955, 1990). For example, the polynucleotides encoding the antibodies described in Tables 1-3 can be assembled with appropriate control and signal sequences using routine procedures of recombinant DNA methodology. See, e.g., as described in U.S. Pat. No. 4,593,002, and Langford, et al., Molec. Cell. Biol. 6: 3191, 1986.

[0157] Such polynucleotide sequence encoding the antibodies described herein can be synthesized chemically or isolated by one of several approaches. The polynucleotide sequence to be synthesized can be designed with the appropriate codons for the desired amino acid sequence. In general, one will select preferred codons for the intended host in which the sequence will be used for expression. The complete sequence may be assembled from overlapping oligonucleotides prepared by standard methods and assembled into a complete coding sequence. See, e.g., Edge, Nature 292: 756, 1981; Nambair, et al. Science 223: 1299, 1984; Jay, et al., J.

Biol. Chem. 259: 6311, 1984.

[0158] In one aspect, polynucleotides encoding an an-HVEM antibody described herein are isolated individually using the polymerase chain reaction and/or are chemically synthesized (M. A. Innis, et al., In PCR Protocols: A Guide to Methods and Applications, Academic Press, 1990). Preferably, isolated fragments are bordered by compatible restriction endonuclease sites which allow for easy cloning into an expression construct. This technique is well known to those of skill in the art. Sequences may be fused directly to each other (e.g., with no intervening sequences), or inserted into one another (e.g., where domain sequences are discontinuous), or may be separated by intervening sequences (e.g., such as linker sequences).

[0159] The basic strategies for preparing oligonucleotide primers, probes and DNA libraries, as well as their screening by nucleic acid hybridization, are well known to those of ordinary skill in the art. See, e.g., Sambrook, et al., 1989, supra; Perbal, 1984, supra. The construction of an appropriate genomic DNA or cDNA library is within the skill of the art. See, e.g., Perbal, 1984, supra. Alternatively, suitable DNA libraries or publicly available clones are available from suppliers of biological research materials, such as Clonetech and Stratagene, as well as from public depositories such as the American Type Culture Collection.

[0160] Selection may be accomplished by expressing sequences from an expression library of DNA and detecting the expressed anti-HVEM antibodies. Such selection procedures are well known to those of ordinary skill in the art (see, e.g., Sambrook, et al., 1989, supra). The anti-HVEM antibody sequence can preferably be cloned into a vector comprising an origin of replication for maintaining the sequence in a host cell.

[0161] In preferred embodiments, polynucleotides encoding an an-HVEM antibody described herein further comprises a polynucleotide sequence for insertion into a target cell and an expression control sequence operably linked thereto to control expression of the polynucleotide sequence (e.g., transcription and/or translation) in the cell. Examples include plasmids, phages, autonomously replicating sequences (ARS), centromeres, and other sequences which are able to replicate or be replicated in vitro or in a host cell (e.g., such as a bacterial, yeast, or insect cell) and/or target cell (e.g., such as a mammalian cell, preferably an antigen presenting cell) and/or to convey the polynucleotides encoding an an-HVEM antibody described herein to a desired location within the target cell.

[0162] Recombinant expression vectors may be derived from micro-organisms which readily infect animals, including horses, cows, pigs, llamas, giraffes, dogs, cats or chickens. Preferred vectors include those which have already been used as live vaccines, such as vaccinia. These recombinants can be directly inoculated into a host, conferring immunity not only to the microbial vector, but also to express the anti-HVEM antibodies described herein. Preferred vectors contemplated herein as live recombinant vaccines include RNA viruses, adenovirus, herpesviruses, poliovirus, and vaccinia and other pox viruses, as taught in Flexner, Adv. Pharmacol. 21: 51, 1990, for example.

[0163] Expression control sequences include, but are not limited to, promoter sequences to bind RNA polymerase, enhancer sequences or negative regulatory elements to bind to transcriptional activators and repressors, respectively, and/or translation initiation sequences for ribosome binding. For example, a bacterial expression vector can include a promoter such as the lac promoter and for transcription initiation, the Shine-Dalgarno sequence and the start codon AUG (Sambrook, et al., 1989, supra). Similarly, a eukaryotic expression vector preferably includes a heterologous, homologous, or chimeric promoter for RNA polymerase II, a downstream polyadenylation signal, the start codon AUG, and a termination codon for detachment of a ribosome.

[0164] Expression control sequences may be obtained from naturally occurring genes or may be designed. Designed expression control sequences include, but are not limited to, mutated and/or chimeric expression control sequences or synthetic or cloned consensus sequences. Vectors that contain both a promoter and a cloning site into which a polynucleotide can be operatively linked are well known in the art. Such vectors are capable of transcribing RNA in vitro or in vivo, and are commercially available from sources such as Stratagene (La Jolla, Calif.) and Promega Biotech (Madison, Wis.).

[0165] In order to optimize expression and/or transcription, it may be necessary to remove, add or alter 5′ and/or 3′ untranslated portions of the vectors to eliminate extra, or alternative translation initiation codons or other sequences that may interfere with, or reduce, expression, either at the level of transcription or translation. Alternatively, consensus ribosome binding sites can be inserted immediately 5′ of the start codon to enhance expression. A wide variety of expression control sequences—sequences that control the expression of a DNA sequence operatively linked to it—may be used in these vectors to express the DNA sequences of this invention. Such useful expression control sequences include, for example, the early or late promoters of SV40, CMV, vaccinia, polyoma, adenovirus, herpes virus and other sequences known to control the expression of genes of mammalian cells, and various combinations thereof.

[0166] In one aspect, an anti-HVEM antibody expressing construct comprises an origin of replication for replicating the vector. Preferably, the origin functions in at least one type of host cell which can be used to generate sufficient numbers of copies of the sequence for use in delivery to a target cell. Suitable origins therefore include, but are not limited to, those which function in bacterial cells (e.g., such as Escherichia sp., Salmonella sp., Proteus sp., Clostridium sp., Klebsiella sp., Bacillus sp., Streptomyces sp., and Pseudomonas sp.), yeast (e.g., such as Saccharamyces sp. or Pichia sp.), insect cells, and mammalian cells. In one preferred aspect, an origin of replication is provided which functions in the target cell into which the vehicle is introduced (e.g., a mammalian cell, such as a human cell). In another aspect, at least two origins of replication are provided, one that functions in a host cell and one that functions in a target cell.

[0167] The constructs comprising the polynucleotides encoding the anti-HVEM antibody as described herein may alternatively, or additionally, comprise sequences to facilitate integration of at least a portion of the polynucleotide into a target cell chromosome. For example, the construct may comprise regions of homology to target cell chromosomal DNA. In one aspect, the construct comprises two or more recombination sites which flank a nucleic acid sequence encoding the polynucleotide encoding the anti-HVEM antibody described herein.

[0168] The vector may additionally comprise a detectable and/or selectable marker to verify that the vector has been successfully introduced in a target cell and/or can be expressed by the target cell. These markers can encode an activity, such as, but not limited to, production of RNA, peptide, or protein, or can provide a binding site for RNA, peptides, proteins, inorganic and organic compounds or compositions and the like.

[0169] Examples of detectable/selectable markers genes include, but are not limited to: polynucleotide segments that encode products which provide resistance against otherwise toxic compounds (e.g., antibiotics); polynucleotide segments that encode products which are otherwise lacking in the recipient cell (e.g., tRNA genes, auxotrophic markers); polynucleotide segments that encode products which suppress the activity of a gene product; polynucleotide segments that encode products which can be readily identified (e.g., phenotypic markers such as beta-galactosidase, a fluorescent protein (GFP, CFP, YFG, BFP, RFP, EGFP, EYFP, EBFP, dsRed, mutated, modified, or enhanced forms thereof, and the like), and cell surface proteins); polynucleotide segments that bind products which are otherwise detrimental to cell survival and/or function; polynucleotide segments that otherwise inhibit the activity of other nucleic acid segments (e.g., antisense oligonucleotides); polynucleotide segments that bind products that modify a substrate (e.g., restriction endonucleases); polynucleotide segments that can be used to isolate or identify a desired molecule (e.g., segments encoding specific protein binding sites); primer sequences; polynucleotide segments, which when absent, directly or indirectly confer resistance or sensitivity to particular compounds; and/or polynucleotide segments that encode products which are toxic in recipient cells.

[0170] The marker gene can be used as a marker for conformation of successful gene transfer and/or to isolate cells expressing transferred genes and/or to recover transferred genes from a cell.

[0171] In another preferred embodiment, a polynucleotide encoding an anti-HVEM antibody can be delivered to cells such as by microinjection of DNA into the nucleus of a cell (Capechi, et al., 1980, Cell 22: 479-488); transfection with CaPO₄ (Chen and Okayama, 1987, Mol. Cell Biol. 7: 2745 2752), electroporation (Chu, et al., 1987, Nucleic Acid Res. 15: 1311-1326); lipofection/liposome fusion (Feigner, et al., 1987, Proc. Natl. Acad. Sci. USA 84: 7413-7417) and particle bombardment (Yang, et al., 1990, Proc. Natl. Acad. Sci. USA 87: 9568-9572).

[0172] The anti-HVEM antibody constructs according to the invention can be expressed in a variety of host cells, including, but not limited to: prokaryotic cells (e.g., E. coli, Staphylococcus sp., Bacillus sp.); yeast cells (e.g., Saccharomyces sp.); insect cells; nematode cells; plant cells; amphibian cells (e.g., Xenopus); avian cells; and mammalian cells (e.g., human cells, mouse cells, mammalian cell lines, primary cultured mammalian cells, such as from dissected tissues).

[0173] In one aspect, anti-HVEM antibody constructs are expressed in host cells in vitro, e.g., in culture. In another aspect, anti-HVEM antibody constructs are expressed in a transgenic organism (e.g., a transgenic mouse, rat, rabbit, pig, primate, etc.) that comprises somatic and/or germline cells comprising nucleic acids encoding the anti-HVEM antibody constructs. Methods for constructing transgenic animals are well known in the art and are routine. The anti-HVEM antibody constructs also can be introduced into cells in vitro, and the cells (e.g., such as stem cells, hematopoietic cells, lymphocytes, and the like) can be introduced into the host organism. The cells may be heterologous or autologous with respect to the host organism. For example, cells can be obtained from the host organism, anti-HVEM antibody constructs introduced into the cells in vitro, and then reintroduced into the host (non-human vertebrate).

[0174] Additionally, the anti-HVEM antibodies disclosed herein can be affinity matured using techniques well known in the art, such as display technology, such as for example, phage display, yeast display or ribosome display. In one example, single chain anti-HVEM antibody molecules (“scFvs”) displayed on the surface of phage particles are screened to identify those scFvs that immunospecifically bind to a HVEM antigen. The present invention encompasses both scFvs and portions thereof that are identified to immunospecifically bind to a HVEM antigen. Such scFvs can routinely be “converted” to immunoglobulin molecules by inserting, for example, the nucleotide sequences encoding the VH and/or VL domains of the scFv into an expression vector containing the constant domain sequences and engineered to direct the expression of the immunoglobulin molecule.

[0175] Recombinant expression of the raised antibodies (including scFvs and other molecules comprising, or alternatively consisting of, antibody fragments or variants thereof (e.g., a heavy or light chain of an antibody of the invention or a portion thereof or a single chain antibody of the invention)), requires construction of an expression vector(s) containing a polynucleotide that encodes the anti-HVEM antibody comprising the sequences disclosed in Tables 2-3. Once a polynucleotide encoding such an antibody molecule (e.g., a whole antibody, a heavy or light chain of an antibody, or variant or portion thereof (preferably, but not necessarily, containing the heavy or light chain variable domain)), of the invention has been obtained, the vector(s) for the production of the antibody molecule may be produced by recombinant DNA technology using techniques well known in the art. Thus, methods for preparing an anti-HVEM antibody described herein can occur simply by expressing a polynucleotide encoding the anti-HVEM antibody described in Tables 1-3 using techniques well known in the art. Methods which are well known to those skilled in the art can be used to construct expression vectors containing the antibody coding sequences and appropriate transcriptional and translational control signals. These methods include, for example, in vitro recombinant DNA techniques, synthetic techniques, and in vivo genetic recombination and are described herein. The invention, thus, provides replicable vectors comprising a nucleotide sequence encoding the anti-HVEM antibody obtained and isolated as described herein (e.g., a whole antibody, a heavy or light chain of an antibody, a heavy or light chain variable domain of an antibody, or a portion thereof, or a heavy or light chain CDR, a single chain Fv, or fragments or variants thereof), operably linked to a promoter. Such vectors may include the nucleotide sequence encoding the constant region of the antibody molecule (see, e.g., PCT Publication WO 86/05807; PCT Publication WO 89/01036; and U.S. Pat. No. 5,122,464) and the variable domain of the antibody may be cloned into such a vector for expression of the entire heavy chain, the entire light chain, or both the entire heavy and light chains.

[0176] The expression vector(s) can be transferred to a host cell by conventional techniques and the transfected cells are then cultured by conventional techniques to produce the anti-HVEM antibody. Thus, the invention includes host cells containing polynucleotide(s) encoding the anti-HVEM antibody (e.g., whole antibody, a heavy or light chain thereof, or portion thereof, or a single chain antibody of the invention, or a fragment or variant thereof), operably linked to a heterologous promoter. In preferred embodiments, for the expression of entire antibody molecules, vectors encoding both the heavy and light chains may be co-expressed in the host cell for expression of the entire immunoglobulin molecule, as detailed below.

[0177] A variety of host-expression vector systems may be utilized to express anti-HVEM antibody. Such host-expression systems represent vehicles by which the coding sequences of interest may be produced and subsequently purified, but also represent cells which may, when transformed or transfected, with the appropriate nucleotide coding sequences, express the anti-HVEM antibody. These include, but are not limited to, microorganisms such as bacteria (e.g., E. coli, B. subtilis) transformed with recombinant bacteriophage DNA, plasmid DNA or cosmid DNA expression vectors containing sequences; yeast (e.g., Saccharomyces, Pichia) transformed with recombinant yeast expression vectors containing coding sequences; insect cell systems infected with recombinant virus expression vectors (e.g., baculovirus) containing coding sequences; plant cell systems infected with recombinant virus expression vectors (e.g., cauliflower mosaic virus, CaMV; tobacco mosaic virus, TMV) or transformed with recombinant plasmid expression vectors (e.g., Ti plasmid) containing coding sequences; or mammalian cell systems (e.g., COS, CHO, BHK, 293, 3T3 cells) harboring recombinant expression constructs containing promoters derived from the genome of mammalian cells (e.g., metallothionein promoter) or from mammalian viruses (e.g., the adenovirus late promoter; the vaccinia virus 7.5K promoter). Preferably, bacterial cells such as Escherichia coli, and more preferably, eukaryotic cells, are used for the expression of the anti-HVEM antibody. For example, mammalian cells such as Chinese hamster ovary cells (CHO), in conjunction with a vector such as the major intermediate early gene promoter element from human cytomegalovirus is an effective expression system (Foecking et al., Gene 45:101 (1986); Cockett et al., Bio/Technology 8:2 (1990)).

[0178] In bacterial systems, a number of expression vectors may be advantageously selected depending upon the intended use. For example, when a large quantity of a protein is to be produced, vectors which direct the expression of high levels of protein products that are readily purified may be desirable. Such vectors include, but are not limited to, the E. coli expression vector pUR278 (Ruther et al., EMBO 1. 2:1791 (1983)), in which the coding sequence may be ligated individually into the vector in frame with the lac Z coding region so that a fusion protein is produced; pIN vectors (Inouye & Inouye, Nucleic Acids Res. 13:3101-3109 (1985); Van Heeke & Schuster, J. Biol. Chem. 24:5503-5509 (1989)); and the like. pGEX vectors may also be used to express foreign polypeptides as fusion proteins with glutathione 5-transferase (GST). In general, such fusion proteins are soluble and can easily be purified from lysed cells by adsorption and binding to matrix glutathione agarose beads followed by elution in the presence of free glutathione. The pGEX vectors are designed to include thrombin or Factor Xa protease cleavage sites so that the cloned target gene product can be released from the GST moiety.

[0179] In an insect system, Autographa californica nuclear polyhedrosis virus (AcNPV) may be used as a vector to express an anti-HVEM antibody. The virus grows in Spodoptera frugiperda cells. Coding sequences may be cloned individually into non-essential regions (for example, the polyhedrin gene) of the virus and placed under control of an AcNPV promoter (for example, the polyhedrin promoter).

[0180] In mammalian host cells, a number of viral-based expression systems may be utilized express an anti-HVEM antibody. In cases where an adenovirus is used as an expression vector, the coding sequence of interest may be ligated to an adenovirus transcription/translation control complex, e.g., the late promoter and tripartite leader sequence. This chimeric gene may then be inserted in the adenovirus genome by in vitro or in vivo recombination.

[0181] Insertion in a non-essential region of the viral genome (e.g., region E1 or E3) will result in a recombinant virus that is viable and capable of expressing the anti-HVEM antibody or the encoded polypeptides of the LAMP Construct in infected hosts (e.g., see Logan & Shenk, Proc. Natl. Acad. Sci. USA 8 1:355-359 (1984)).

[0182] Specific initiation signals may also be required for efficient translation of inserted coding sequences. These signals include the ATG initiation codon and adjacent sequences. Furthermore, the initiation codon must be in phase with the reading frame of the desired coding sequence to ensure translation of the entire insert. These exogenous translational control signals and initiation codons can be of a variety of origins, both natural and synthetic. The efficiency of expression may be enhanced by the inclusion of appropriate transcription enhancer elements, transcription terminators, etc. (see, e.g., Bittner et al., Methods in Enzymol. 153:51-544 (1987)).

[0183] In addition, a host cell strain may be chosen which modulates the expression of the inserted sequences, or modifies and processes the gene product in the specific fashion desired. Such modifications (e.g., glycosylation) and processing (e.g., cleavage) of protein products may be important for the function of the protein. Different host cells have characteristic and specific mechanisms for the post-translational processing and modification of proteins and gene products. Appropriate cell lines or host systems can be chosen to ensure the correct modification and processing of the foreign protein expressed, to this end, eukaryotic host cells which possess the cellular machinery for proper processing of the primary transcript, glycosylation, and phosphorylation of the gene product may be used. Such mammalian host cells include, but are not limited to, CHO, VERY, BHK, Hela, COS, NSO, MDCK, 293, 3T3, W138, and in particular, breast cancer cell lines such as, for example, BT483, Hs578T, HTB2, BT20 and T47D, and normal mammary gland cell line such as, for example, CRL7030 and HsS78Bst.

[0184] For long-term, high-yield production of recombinant proteins, stable expression is preferred. For example, cell lines which stably express the anti-HVEM antibody may be engineered. Rather than using expression vectors which contain viral origins of replication, host cells can be transformed with a polynucleotide controlled by appropriate expression control elements (e.g., promoter, enhancer, sequences, transcription terminators, polyadenylation sites, etc.), and a selectable marker. Following the introduction of the foreign polynucleotide, engineered cells may be allowed to grow for 1-2 days in an enriched media, and then are switched to a selective media. The selectable marker in the recombinant plasmid confers resistance to the selection and allows cells to stably integrate the plasmid into their chromosomes and grow to form foci which in turn can be cloned and expanded into cell lines. This method may advantageously be used to engineer cell lines which express the anti-HVEM antibody.

[0185] A number of selection systems may be used, including but not limited to, the herpes simplex virus thymidine kinase (Wigler et al., Cell 11:223 (1977)), hypoxanthineguanine phosphoribosyltransferase (Szybalska & Szybalski, Proc. Natl. Acad. Sci. USA 48:202 (1992)), and adenine phosphoribosyltransferase (Lowy et al., Cell 22:8 17 (1980)) genes can be employed in tk-, hgprt- or aprt- cells, respectively. Also, antimetabolite resistance can be used as the basis of selection for the following genes: dhfr, which confers resistance to methotrexate (Wigler et al., Natl. Acad. Sci. USA 77:357 (1980); O'Hare et al., Proc. Natl. Acad. Sci. USA 78:1527 (1981)); gpt, which confers resistance to mycophenolic acid (Mulligan & Berg, Proc. Natl. Acad. Sci. USA 78:2072 (1981)); neo, which confers resistance to the aminoglycoside G-418 (Goldspiel et al., Clinical Pharmacy, 12: 488-505 (1993); Wu and Wu, Biotherapy 3:87-95 (1991); Tolstoshev, Ann. Rev. Pharmacol. Toxicol. 32:573-596 (1993); Mulligan, Science 260:926-932 (1993); and Morgan and Anderson, Ann. Rev. Biochem. 62: 191-217 (1993); TIB TECH 11(5):155-2 15 (May; 1993)); and hygro, which confers resistance to hygromycin (Santerre et al., Gene 30:147 (1984)). Methods commonly known in the art of recombinant DNA technology may be routinely applied to select the desired recombinant clone, and such methods are described, for example; in Ausubel et al. (eds.), Current Protocols in Molecular Biology, John Wiley & Sons, N Y (1993); Kriegler, Gene Transfer and Expression, A Laboratory Manual, Stockton Press, N Y (1990); and in Chapters 12 and 13, Dracopoli et al. (eds), Current Protocols in Human Genetics, John Wiley & Sons, N Y (1994); Colberre-Garapin et al., J. Mol. Biol. 150:1 (1981).

[0186] The expression levels of an anti-HVEM antibody can be increased by vector amplification (for a review, see Bebbington and Hentschel, The Use Of Vectors Based On Gene Amplification For The Expression Of Cloned Genes In Mammalian Cells In DNA Cloning, Vol. 3. (Academic Press, New York, 1987)). When a marker in the vector system expressing an anti-HVEM antibody is amplifiable, an increase in the level of inhibitor present in the host cell culture will increase the number of copies of the marker gene. Since the amplified region is associated with the coding sequence, production of the anti-HVEM antibody express will also increase (Crouse et al., Mol. Cell. Biol. 3:257 (1983)).

[0187] Other elements that can be included in vector sequences include heterologous signal peptides (secretion signals), membrane anchoring sequences, introns, alternative splice sites, translation start and stop signals, inteins, biotinylation sites and other sites promoting post-translational modifications, purification tags, sequences encoding fusions to other proteins or peptides, separate coding regions separated by internal ribosome reentry sites, sequences encoding “marker” proteins that, for example, confer selectability (e.g., antibiotic resistance) or sortability (e.g., fluorescence), modified nucleotides, and other known polynucleotide cis-acting features not limited to these examples.

[0188] The host cell may be co-transfected with two expression vectors of the invention, for example, the first vector encoding a heavy chain derived polypeptide and the second vector encoding a light chain derived polypeptide. The two vectors may contain identical selectable markers which enable equal expression of heavy and light chain polypeptides. Alternatively, a single vector may be used which encodes, and is capable of expressing, both heavy and light chain anti-HVEM polypeptides. In such situations, the light chain is preferably placed before the heavy chain to avoid an excess of toxic free heavy chain (Proudfoot, Nature 322:52 (1986); Kohler, Proc. Natl. Acad. Sci. USA 77:2 197 (1980)). The coding sequences for the heavy and light chains may comprise cDNA or genomic DNA or synthetic DNA sequences.

[0189] Once an anti-HVEM antibody has been produced by recombinant expression, it may be purified by any method known in the art for purification of a protein, for example, by chromatography (e.g., ion exchange, affinity (particularly by Protein A affinity and immunoaffinity), and sizing column chromatography), centrifugation, differential solubility, or by any other standard technique for the purification of proteins. Further, an anti-HVEM antibody may be fused to heterologous polypeptide sequences described herein or otherwise known in the art to facilitate purification.

[0190] In one example, the anti-HVEM antibody may be fused with the constant domain of immunoglobulins (IgA, IgE, IgG, IgM), or portions thereof (CH1, CH2, CH3, or any combination thereof and portions thereof), or albumin (including but not limited to recombinant human albumin or fragments or variants thereof (see, e.g., U.S. Pat. No. 5,876,969, issued Mar. 2, 1999, EP Patent 0 413 622, and U.S. Pat. No. 5,766,883, issued Jun. 16, 1998), resulting in chimeric polypeptides. Such fusion proteins may facilitate purification and may increase half-life in vivo. This has been shown for chimeric proteins consisting of the first two domains of the human CD4-polypeptide and various domains of the constant regions of the heavy or light chains of mammalian immunoglobulins. See, e.g., EP 394,827; Traunecker et al., Nature, 331:84-86 (1988). Enhanced delivery of an antigen across the epithelial barrier to the immune system has been demonstrated for antigens (e.g., insulin) conjugated to an FcRn binding partner such as IgG or Fe fragments (see, e.g., PCT Publications WO 96/22024 and WO 99/04813). IgG Fusion proteins that have a disulfide-linked dimeric structure due to the IgG portion disulfide bonds have also been found to be more efficient in binding and neutralizing other molecules than monomeric polypeptides or fragments thereof alone. See, e.g., Fountoulakis et al., J. Biochem., 270:3958-3964 (1995). Nucleic acids encoding the anti-HVEM antibody described herein can also be recombined with a gene of interest as an epitope tag (e.g., the hemagglutinin (“HA”) tag or flag tag) to aid in detection and purification of the expressed polypeptide. For example, a system described by Janknecht et al. allows for the ready purification of non-denatured fusion proteins expressed in human cell lines (Janknecht et al., 1991, Proc. Natl. Acad. Sci. USA 88:8972-897). In this system, the gene of interest is subcloned into a vaccinia recombination plasmid such that the open reading frame of the gene is translationally fused to an amino-terminal tag consisting of six histidine residues. The tag serves as a matrix-binding domain for the fusion protein. Extracts from cells infected with the recombinant vaccinia virus are loaded onto Ni2+nitriloacetic acid-agarose column and histidine-tagged proteins can be selectively eluted with imidazole-containing buffers.

### Tumor Therapy Treated by Anti-HVEM Antibodies

[0191] Tumor therapy, as referred to herein, includes using the anti-HVEM antibody described herein which reduce the rate of tumor growth, that is slow down, but may not necessarily eliminate all tumor growth. Reduction in the rate of tumor growth can be, for example, a reduction in at least 10%, 20%, 30%, 40%, 50%, 75%, 100%, 150%, 200% or more of the rate of growth of a tumor. For example, the rate of growth can be measured over 1, 2, 3, 4, 5, 6 or 7 days, or for longer periods of one or more weeks. In some embodiments, the invention may result in the arrest of tumor growth, or the reduction in tumor size or the elimination of a tumor.

[0192] The anti-HVEM antibodies as described herein may be used to treat a subject suffering from a tumor alone, or in combination with a second therapy, such as one directed to a tumor antigen as described below.

[0193] A subject suitable for treatment as described above may be a mammal, such as a rodent (e.g. a guinea pig, a hamster, a rat, a mouse), murine (e.g. a mouse), canine (e.g. a dog), feline (e.g. a cat), equine (e.g. a horse), a primate, simian (e.g. a monkey or ape), a monkey (e.g. marmoset, baboon), an ape (e.g. gorilla, chimpanzee, orangutan, gibbon), or a human. Thus, in some embodiments, the subject is a human. In other embodiments, non-human mammals, especially mammals that are conventionally used as models for demonstrating therapeutic efficacy in humans (e.g. murine, primate, porcine, canine, or rabbit animals) may be employed.

[0194] In some embodiments, the subject may have minimal residual disease (MRD) after an initial cancer treatment. A subject with cancer may display at least one identifiable sign, symptom, or laboratory finding that is sufficient to make a diagnosis of cancer in accordance with clinical standards known in the art. Examples of such clinical standards can be found in textbooks of medicine such as Harrison's Principles of Internal Medicine, 15th Ed., Fauci A S et al., eds., McGraw-Hill, New York, 2001. In some instances, a diagnosis of a cancer in a subject may include identification of a particular cell type (e.g. a cancer cell) in a sample of a body fluid or tissue obtained from the subject.

[0195] In some embodiments, the cancer cells may express one or more antigens that are not expressed by normal somatic cells in the subject (i.e. tumor antigens). Tumor antigens are known in the art and may elicit immune responses in the subject. In particular, tumor antigens may elicit T-cell-mediated immune responses against cancer cells in the subject i.e. the tumor antigens may be recognized by CD8+ T-cells in the subject.

[0196] Tumor antigens expressed by cancer cells in a cancerous tumor may include, for example, cancer-testis (CT) antigens encoded by cancer-germ line genes, such as MAGE-A1, MAGE-A2, MAGE-A3, MAGE-A4, MAGE-A5, MAGE-A6, MAGE-A7, MAGE-A8, MAGE-A9, MAGE-A10, MAGE-A11, MAGE-A12, GAGE-I, GAGE-2, GAGE-3, GAGE-4, GAGE-5, GAGE-6, GAGE-7, GAGE-8, BAGE-I, RAGE-1, LB33/MUM-1, PRAME, NAG, MAGE-Xp2 (MAGE-B2), MAGE-Xp3 (MAGE-B3), MAGE-Xp4 (MAGE-B4), MAGE-C1/CT7, MAGE-C2, NY-ESO-I, LAGE-I, SSX-I, SSX-2(HOM-MEL-40), SSX-3, SSX-4, SSX-5, SCP-I and XAGE and immunogenic fragments thereof (Simpson et al., Nature Rev (2005) 5, 615-625, Gure et al., Clin Cancer Res (2005) 11, 8055-8062; Velazquez et al., Cancer Immun (2007) 7, 11; Andrade et al., Cancer Immun (2008) 8, 2; Tinguely et al., Cancer Science (2008); Napoletano et al., Am J of Obstet Gyn (2008) 198, 99 e91-97).

[0197] Other tumor antigens that may be expressed include, for example, overexpressed or mutated proteins and differentiation antigens particularly melanocyte differentiation antigens such as p53, ras, CEA, MUC1, PMSA, PSA, tyrosinase, Melan-A, MART-1, gp100, gp75, alpha-actinin-4, Bcr-Abl fusion protein, Casp-8, beta-catenin, cdc27, cdk4, cdkn2a, coa-1, dek-can fusion protein, EF2, ETV6-AML1 fusion protein, LDLR-fucosyltransferaseAS fusion protein, HLA-A2, HLA-A11, hsp70-2, KIAAO205, Mart2, Mum-2, and 3, neo-PAP, myosin class I, OS-9, pml-RAR.alpha. fusion protein, PTPRK, K-ras, N-ras, Triosephosphate isomeras, GnTV, Herv-K-mel, NA-88, SP17, and TRP2-Int2, (MART-1), E2A-PRL, H4-RET, IGH-IGK, MYL-RAR, Epstein Barr virus antigens, EBNA, human papillomavirus (HPV) antigens E6 and E7, TSP-180, MAGE-4, MAGE-5, MAGE-6, pi85erbB2, p180erbB-3, c-met, nm-23H1, PSA, TAG-72-4, CA 19-9, CA 72-4, CAM 17.1, NuMa, K-ras, alpha.-fetoprotein, 13HCG, BCA225, BTAA, CA 125, CA 15-3 (CA 27.29BCAA), CA 195, CA 242, CA-50, CAM43, CD68\KP1, CO-029, FGF-5, G250, Ga733 (EpCAM), HTgp-175, M344, MA-50, MG7-Ag, MOV18, NB\170K, NY-CO-1, RCAS1, SDCCAG16, TA-90 (Mac-2 binding protein\cyclophilin C-associated protein), TAAL6, TAG72, TLP, and TPS and tyrosinase related proteins such as TRP-1, TRP-2, and mesothelin.

[0198] Other tumor antigens that may be expressed include out-of-frame peptide-MHC complexes generated by the non-AUG translation initiation mechanisms employed by “stressed” cancer cells (Malarkannan et al. Immunity 1999). Other prefer examples of tumor antigens that may be expressed are well-known in the art (see for example WO00/20581; Cancer Vaccines and Immunotherapy (2000) Eds Stern, Beverley and Carroll, Cambridge University Press, Cambridge) The sequences of these tumor antigens are readily available from public databases but are also found in WO 1992/020356 A1, WO 1994/005304 A1, WO 1994/023031 A1, WO 1995/020974 A1, WO 1995/023874 A1 & WO 1996/026214 A1.

### Formulations

[0199] The anti-HVEM antibody as described herein may be administered together with other anti-cancer therapies, such as conventional chemotherapeutic agents, radiation therapy or cancer immunotherapy. For example, the anti-HVEM antibody is administered together with an anti-cancer compound. The anti-HVEM antibody and the anti-cancer compound may be separate compounds or molecules or they may be covalently or non-covalently linked in a single compound, molecule, particle or complex.

[0200] An anti-cancer compound may be any anti-cancer drug or medicament which has activity against cancer cells. Suitable anti-cancer compounds for use in combination with the anti-HVEM antibody as disclosed herein may include aspirin, sulindac, curcumin, alkylating agents including: nitrogen mustards, such as mechlor-ethamine, cyclophosphamide, ifosfamide, melphalan and chlorambucil; nitrosoureas, such as carmustine (BCNU), lomustine (CCNU), and semustine (methyl-CCNU); thylenimines/methylmelamine such as thriethylenemelamine (TEM), triethylene, thiophosphoramide (thiotepa), hexamethylmelamine (HMM, altretamine); alkyl sulfonates such as busulfan; triazines such as dacarbazine (DTIC); antimetabolites including folic acid analogs such as methotrexate and trimetrexate, pyrimidine analogs such as 5-fluorouracil, fluorodeoxyuridine, gemcitabine, cytosine arabinoside (AraC, cytarabine), 5-azacytidine, 2,2′-difluorodeoxycytidine, purine analogs such as 6-mercaptopurine, 6-thioguanine, azathioprine, 2′-deoxycoformycin (pentostatin), erythrohydroxynonyladenine (EHNA), fludarabine phosphate, and 2-chlorodeoxyadenosine (cladribine, 2-CdA); natural products including antimitotic drugs such as paclitaxel, vinca alkaloids including vinblastine (VLB), vincristine, and vinorelbine, taxotere, estramustine, and estramustine phosphate; epipodophylotoxins such as etoposide and teniposide; antibiotics, such as actimomycin D, daunomycin (rubidomycin), doxorubicin, mitoxantrone, idarubicin, bleomycins, plicamycin (mithramycin), mitomycinC, and actinomycin; enzymes such as L-asparaginase, cytokines such as interferon (IFN)-gamma, tumor necrosis factor (TNF)-alpha, TNF-beta and GM-CSF, anti-angiogenic factors, such as angiostatin and endostatin, inhibitors of FGF or VEGF such as soluble forms of receptors for angiogenic factors, including soluble VGFNEGF receptors, platinum coordination complexes such as cisplatin and carboplatin, anthracenediones such as mitoxantrone, substituted urea such as hydroxyurea, methylhydrazine derivatives including N-methylhydrazine (MIH) and procarbazine, adrenocortical suppressants such as mitotane (o,p′-DDD) and aminoglutethimide; hormones and antagonists including adrenocorticosteroid antagonists such as prednisone and equivalents, dexamethasone and aminoglutethimide; progestin such as hydroxyprogesterone caproate, medroxyprogesterone acetate and megestrol acetate; estrogen such as diethylstilbestrol and ethinyl estradiol equivalents; antiestrogen such as tamoxifen; androgens including testosterone propionate and fluoxymesterone/equivalents; antiandrogens such as flutamide, gonadotropin-releasing hormone analogs and leuprolide; non-steroidal antiandrogens such as flutamide; kinase inhibitors, histone deacetylase inhibitors, methylation inhibitors, proteasome inhibitors, monoclonal antibodies, oxidants, anti-oxidants, telomerase inhibitors, BH3 mimetics, ubiquitin ligase inhibitors, stat inhibitors and receptor tyrosin kinase inhibitors such as imatinib mesylate (marketed as Gleevac or Glivac) and erlotinib (an EGF receptor inhibitor) now marketed as Tarveca; and anti-virals such as oseltamivir phosphate, Amphotericin B, and palivizumab.

[0201] While it is possible for anti-HVEM antibody and anti-cancer compounds to be administered alone, it is preferable (when possible) to present the compounds in the same or separate pharmaceutical compositions (e.g. formulations).

[0202] A pharmaceutical composition may comprise, in addition to the anti-HVEM antibody and/or an anti-cancer compound, one or more pharmaceutically acceptable carriers, adjuvants, excipients, diluents, fillers, buffers, stabilizers, preservatives, lubricants, or other materials well known to those skilled in the art. Suitable materials will be sterile and pyrogen-free, with a suitable isotonicity and stability. Examples include sterile saline (e.g. 0.9% NaCl), water, dextrose, glycerol, ethanol or the like or combinations thereof. Such materials should be non-toxic and should not interfere with the efficacy of the active compound. The precise nature of the carrier or other material will depend on the route of administration, which may be by bolus, infusion, injection or any other suitable route, as discussed below. Suitable materials will be sterile and pyrogen free, with a suitable isotonicity and stability. Examples include sterile saline (e.g. 0.9% NaCl), water, dextrose, glycerol, ethanol or the like or combinations thereof. The composition may further contain auxiliary substances such as wetting agents, emulsifying agents, pH buffering agents or the like.

[0203] Suitable carriers, excipients, etc. can be found in standard pharmaceutical texts, for example, Remington's Pharmaceutical Sciences, 18th edition, Mack Publishing Company, Easton, Pa., 1990.

[0204] The term “pharmaceutically acceptable” as used herein pertains to compounds, materials, compositions, and/or dosage forms which are, within the scope of sound medical judgment, suitable for use in contact with the tissues of a subject (e.g. human) without excessive toxicity, irritation, allergic response, or other problem or complication, commensurate with a reasonable benefit/risk ratio. Each carrier, excipient, etc. must also be “acceptable” in the sense of being compatible with the other ingredients of the formulation.

[0205] In some embodiments, one or both of the anti-HVEM antibody and anti-cancer compound may be provided in a lyophilized form for reconstitution prior to administration. For example, lyophilized reagents may be re-constituted in sterile water and mixed with saline prior to administration to a subject

[0206] The formulations may conveniently be presented in unit dosage form and may be prepared by any methods well known in the art of pharmacy. Such methods include the step of bringing into association the active compound with the carrier which constitutes one or more accessory ingredients. In general, the formulations are prepared by uniformly and intimately bringing into association the active compound with liquid carriers or finely divided solid carriers or both, and then if necessary shaping the product.

[0207] Formulations may be in the form of liquids, solutions, suspensions, emulsions, elixirs, syrups, tablets, lozenges, granules, powders, capsules, cachets, pills, ampoules, suppositories, pessaries, ointments, gels, pastes, creams, sprays, mists, foams, lotions, oils, boluses, electuaries, or aerosols. Optionally, other therapeutic or prophylactic agents may be included in a pharmaceutical composition or formulation.

[0208] Increasing immune response to tumors as described herein may be useful in immunotherapy for the treatment of cancer. Treatment may be any treatment and therapy, whether of a human or an animal (e.g. in veterinary applications), in which some desired therapeutic effect is achieved, for example, the inhibition or delay of the progress of the condition, and includes a reduction in the rate of progress, a halt in the rate of progress, amelioration of the condition, cure or remission (whether partial or total) of the condition, preventing, delaying, abating or arresting one or more symptoms and/or signs of the condition or prolonging survival of a subject or patient beyond that expected in the absence of treatment.

[0209] Treatment as a prophylactic measure (i.e. prophylaxis) is also included. For example, a subject susceptible to or at risk of the occurrence or re-occurrence of cancer may be treated as described herein. Such treatment may prevent or delay the occurrence or re-occurrence of cancer in the subject.

[0210] In particular, treatment may include inhibiting cancer growth, including complete cancer remission, and/or inhibiting cancer metastasis. Cancer growth generally refers to any one of a number of indices that indicate change within the cancer to a more developed form. Thus, indices for measuring an inhibition of cancer growth include a decrease in cancer cell survival, a decrease in tumor volume or morphology (for example, as determined using computed tomographic (CT), sonography, or other imaging method), a delayed tumor growth, a destruction of tumor vasculature, improved performance in delayed hypersensitivity skin test, an increase in the activity of cytolytic T-lymphocytes, and a decrease in levels of tumor-specific antigens. Increasing immune response to tumors in a subject may improve the capacity of the subject to resist cancer growth, in particular growth of a cancer already present the subject and/or decrease the propensity for cancer growth in the subject.

[0211] The anti-HVEM antibody may be administered as described herein in therapeutically-effective amounts. The term “therapeutically-effective amount” as used herein, pertains to that amount of an active compound, or a combination, material, composition or dosage form comprising an active compound, which is effective for producing some desired therapeutic effect, commensurate with a reasonable benefit/risk ratio. It will be appreciated that appropriate dosages of the active compounds can vary from patient to patient. Determining the optimal dosage will generally involve the balancing of the level of therapeutic benefit against any risk or deleterious side effects of the administration. The selected dosage level will depend on a variety of factors including, but not limited to, the route of administration, the time of administration, the rate of excretion of the active compound, other drugs, compounds, and/or materials used in combination, and the age, sex, weight, condition, general health, and prior medical history of the patient. The amount of active compounds and route of administration will ultimately be at the discretion of the physician, although generally the dosage will be to achieve concentrations of the active compound at a site of therapy without causing substantial harmful or deleterious side-effects.

[0212] In general, a suitable dose of the active compound is in the range of about 100 μg to about 250 mg per kilogram body weight of the subject per day. Where the active compound is a salt, an ester, prodrug, or the like, the amount administered is calculated on the basis of the parent compound and so the actual weight to be used is increased proportionately.

[0213] For example, an anti-HVEM antibody as described herein, such as such as, for example, a bispecific anti-HVEM antibody, a scFV antibody, or CAR T-cells may be administered by continuous intravenous infusion in an amount sufficient to maintain the serum concentration at a level that inhibits tumor growth. Other anti-HVEM targeted agents described herein can also be used in this same manner.

[0214] Administration in vivo can be effected in one dose, continuously or intermittently (e.g., in divided doses at appropriate intervals). Methods of determining the most effective means and dosage of administration are well known to those of skill in the art and will vary with the formulation used for therapy, the purpose of the therapy, the target cell being treated, and the subject being treated. Single or multiple administrations can be carried out with the dose level and pattern being selected by the physician.

[0215] Administration of anti-cancer compounds and the anti-HVEM antibody may be simultaneous, separate or sequential. By “simultaneous” administration, it is meant that the anti-cancer compounds and the anti-HVEM antibody are administered to the subject in a single dose by the same route of administration. By “separate” administration, it is meant that the anti-cancer compounds and the anti-HVEM antibody are administered to the subject by two different routes of administration which occur at the same time. This may occur for example where one agent is administered by infusion or parenterally and the other is given orally during the course of the infusion or parenteral administration. By “sequential” it is meant that the anti-cancer compounds and the anti-HVEM antibody are administered at different points in time, provided that the activity of the first administered agent is present and ongoing in the subject at the time the second agent is administered. For example, the anti-cancer compounds may be administered first, such that an immune response against a tumor antigen is generated, followed by administration of the anti-HVEM antibody, such that the immune response at the site of the tumor is enhanced, or vice versa. Preferably, a sequential dose will occur such that the second of the two agents is administered within 48 hours, preferably within 24 hours, such as within 12, 6, 4, 2 or 1 hour(s) of the first agent.

[0216] Multiple doses of the anti-HVEM antibody may be administered, for example 2, 3, 4, 5 or more than 5 doses may be administered after administration of the anti-cancer compounds. The administration of the anti-HVEM antibody may continue for sustained periods of time after administration of the anti-cancer compounds. For example, treatment with the anti-HVEM antibody may be continued for at least 1 week, at least 2 weeks, at least 3 weeks, at least 1 month or at least 2 months. Treatment with the anti-HVEM antibody may be continued for as long as is necessary to achieve complete tumor rejection.

[0217] Multiple doses of the anti-cancer compounds may be administered, for example 2, 3, 4, 5 or more than 5 doses may be administered after administration of the HVEM-targeted immune response agent. The administration of the anti-cancer compounds may continue for sustained periods of time after administration of the anti-HVEM antibody. For example, treatment with the anti-cancer compounds may be continued for at least 1 week, at least 2 weeks, at least 3 weeks, at least 1 month or at least 2 months. Treatment with the anti-cancer compounds may be continued for as long as is necessary to achieve complete tumor rejection.

[0218] The active compounds or pharmaceutical compositions comprising the active compounds may be administered to a subject by any convenient route of administration, whether systemically/peripherally or at the site of desired action, including but not limited to, oral (e.g. by ingestion); and parenteral, for example, by injection, including subcutaneous, intradermal, intramuscular, intravenous, intraarterial, intracardiac, intrathecal, intraspinal, intracapsular, subcapsular, intraorbital, intraperitoneal, intratracheal, subcuticular, intraarticular, subarachnoid, and intrasternal; by implant of a depot, for example, subcutaneously or intramuscularly. Usually administration will be by the intravenous route, although other routes such as intraperitoneal, subcutaneous, transdermal, oral, nasal, intramuscular or other convenient routes are not excluded.

[0219] The pharmaceutical compositions comprising the active compounds may be formulated in suitable dosage unit formulations appropriate for the intended route of administration.

[0220] Formulations suitable for oral administration (e.g. by ingestion) may be presented as discrete units such as capsules, cachets or tablets, each containing a predetermined amount of the active compound; as a powder or granules; as a solution or suspension in an aqueous or non-aqueous liquid; or as an oil-in-water liquid emulsion or a water-in-oil liquid emulsion; as a bolus; as an electuary; or as a paste.

[0221] A tablet may be made by conventional means, e.g., compression or molding, optionally with one or more accessory ingredients. Compressed tablets may be prepared by compressing in a suitable machine the active compound in a free-flowing form such as a powder or granules, optionally mixed with one or more binders (e.g. povidone, gelatin, acacia, sorbitol, tragacanth, hydroxypropylmethyl cellulose); fillers or diluents (e.g. lactose, microcrystalline cellulose, calcium hydrogen phosphate); lubricants (e.g. magnesium stearate, talc, silica); disintegrants (e.g. sodium starch glycolate, cross-linked povidone, cross-linked sodium carboxymethyl cellulose); surface-active or dispersing or wetting agents (e.g. sodium lauryl sulfate); and preservatives (e.g. methyl p-hydroxybenzoate, propyl p-hydroxybenzoate, sorbic acid). Molded tablets may be made by molding in a suitable machine a mixture of the powdered compound moistened with an inert liquid diluent. The tablets may optionally be coated or scored and may be formulated so as to provide slow or controlled release of the active compound therein using, for example, hydroxypropylmethyl cellulose in varying proportions to provide the desired release profile. Tablets may optionally be provided with an enteric coating, to provide release in parts of the gut other than the stomach.

[0222] Preferred formulations for anti-HVEM antibody delivery include formulations suitable for parenteral administration (e.g. by injection, including cutaneous, subcutaneous, intramuscular, intravenous and intradermal), and include aqueous and non-aqueous isotonic, pyrogen-free, sterile injection solutions which may contain anti-oxidants, buffers, preservatives, stabilizers, bacteriostats, and solutes which render the formulation isotonic with the blood of the intended recipient; and aqueous and non-aqueous sterile suspensions which may include suspending agents and thickening agents, and liposomes or other microparticulate systems which are designed to target the compound to blood components or one or more organs. Examples of suitable isotonic vehicles for use in such formulations include Sodium Chloride Injection, Ringer's Solution, or Lactated Ringer's Injection. Typically, the concentration of the active compound in the solution is from about 1 ng/ml to about 10 μg/ml, for example from about 10 ng/ml to about 1 μg/ml. The formulations may be presented in unit-dose or multi-dose sealed containers, for example, ampoules and vials, and may be stored in a freeze-dried (lyophilized) condition requiring only the addition of the sterile liquid carrier, for example water for injections, immediately prior to use. Extemporaneous injection solutions and suspensions may be prepared from sterile powders, granules, and tablets. Formulations may be in the form of liposomes or other microparticulate systems which are designed to target the active compound to blood components or one or more organs.

[0223] Compositions comprising anti-cancer compounds and/or anti-HVEM antibody may be prepared in the form of a concentrate for subsequent dilution, or may be in the form of divided doses ready for administration. Alternatively, the reagents may be provided separately within a kit, for mixing prior to administration to a human or animal subject.

[0224] The anti-HVEM antibody may be administered alone or in combination with other treatments, either simultaneously or sequentially dependent upon the individual circumstances. For example, anti-HVEM antibodies as described herein may be administered in combination with one or more additional active compounds.

[0225] In some embodiments, the treatment of a subject using an anti-HVEM antibody as described herein may further comprise administering one or more additional immunotherapeutic agents to the subject. An immunotherapeutic agent may facilitate or enhance the targeting of cancer cells by the immune system, in particular T-cells, through the recognition of antigens expressed by the cancer cells. Suitable agents include cancer vaccine preparations designed to induce T lymphocytes (T-cells) recognizing a localized region of an antigen or epitope specific to the tumor cell.

[0226] A cancer vaccine is an agent, a cell-based agent, molecule, or immunogen which stimulates or elicits an endogenous immune response in a subject or subject against one or more tumor antigens. Suitable cancer vaccines are known in the art and may be produced by any convenient technique.

[0227] The use of tumor antigens to generate immune responses is well-established in the art (see for example; Kakimi K, et al. Int J Cancer. 2011 Feb. 3; Kawada J, Int J Cancer. 2011 Mar. 16; Gnjatic S, et al. Clin Cancer Res. 2009 Mar. 15; 15(6):2130-9; Yuan J, et al. Proc Natl Acad Sci USA. 2008 Dec. 23; 105(51):20410-5; Sharma P, et al. J Immunother. 2008 November-December; 31(9):849-57; Wada H, et al. Int J Cancer. 2008 Nov. 15; 123(10):2362-9; Diefenbach C S, et al. Clin Cancer Res. 2008 May 1; 14(9):2740-8; Bender A, et al. Cancer Immun. 2007 Oct. 19; 7:16; Odunsi K, et al. Proc Natl Acad Sci USA. 2007 Jul. 31; 104(31):12837-42; Valmori D, et al. Proc Natl Acad Sci USA. 2007 May 22; 104(21):8947-52; Uenaka A, et al. Cancer Immun. 2007 Apr. 19; 7:9; Kawabata R, et al. Int J Cancer. 2007 May 15; 120(10):2178-84; Jsger E, et al. Proc Natl Acad Sci USA. 2006 Sep. 26; 103(39):14453-8; Davis ID Proc Natl Acad Sci USA. 2005 Jul. 5; 102(27):9734; Chen Q, Proc Natl Acad Sci USA. 2004 Jun. 22; 101(25):9363-8; Jsger E, Proc Natl Acad Sci USA. 2000 Oct. 24; 97(22):12198-203; Carrasco J, et al. J Immunol. 2008 Mar. 1; 180(5):3585-93; van Baren N, et al. J Clin Oncol. 2005 Dec. 10; 23(35):9008-21; Kruit W H, et al. Int J Cancer. 2005 Nov. 20; 117(4):596-604; Marchand M, et al. Eur J Cancer. 2003 January; 39(1):70-7; Marchand M et al. Int J Cancer. 1999 Jan. 18; 80(2):219-30; Atanackovic D, et al. Proc Natl Acad Sci USA. 2008 Feb. 5; 105(5):1650-5).

[0228] Cancer cells from the subject may be analyzed to identify a tumor antigen expressed by the cancer cells. For example, a method as described herein may comprise the step of identifying a tumor antigen which is displayed by one or more cancer cells in a sample obtained from the subject. A cancer vaccine comprising one or more epitopes of the identified tumor antigen may then be administered to the subject whose cancer cells express the antigen. The vaccine may induce or increase an immune response, preferably a T-cell mediated immune response, in the subject against the cancer cells expressing the identified tumor antigen.

[0229] The cancer vaccine may be administered before, at the same time, or after the anti-HVEM antibody is administered to the subject as described here.

[0230] Adoptive T-cell therapy involves the administration to a subject of tumor-specific T-cells to a subject. Preferably, the T-cells were previously isolated from the subject and expanded ex vivo. Suitable adoptive T-cell therapies are well known in the art (J. Clin Invest. 2007 June 1; 117(6): 1466-1476.) For example, adoptive T-cell therapy using CAR T-cells (chimeric antigen receptor) would be greatly improved if used in combination with an anti-HVEM antibody. CAR T-cells must migrate into a tumor to get in proximity to the cancer cells within the tumor in order to mediate their killing activity.

[0231] In some embodiments, the treatment of an individual using an anti-HVEM antibody may further comprise administering one or more tumor therapies to treat the cancerous tumor. Such therapies include, for example, tumor medicaments, radiation and surgical procedures.

[0232] A tumor medicament is an agent which is administered to a subject for the purpose of treating a cancer. Suitable medicaments for the treatment of tumors are well known in the art.

[0233] Suitable medicaments for use in combination with an anti-HVEM antibody as disclosed herein may include aspirin, sulindac, curcumin, alkylating agents including: nitrogen mustards, such as mechlor-ethamine, cyclophosphamide, ifosfamide, melphalan and chlorambucil; nitrosoureas, such as carmustine (BCNU), lomustine (CCNU), and semustine (methyl-CCNU); thylenimines/methylmelamine such as thriethylenemelamine (TEM), triethylene, thiophosphoramide (thiotepa), hexamethylmelamine (HMM, altretamine); alkyl sulfonates such as busulfan; triazines such as dacarbazine (DTIC); antimetabolites including folic acid analogs such as methotrexate and trimetrexate, pyrimidine analogs such as 5-fluorouracil, fluorodeoxyuridine, gemcitabine, cytosine arabinoside (AraC, cytarabine), 5-azacytidine, 2,2′-difluorodeoxycytidine, purine analogs such as 6-mercaptopurine, 6-thioguanine, azathioprine, 2′-deoxycoformycin (pentostatin), erythrohydroxynonyladenine (EHNA), fludarabine phosphate, and 2-chlorodeoxyadenosine (cladribine, 2-CdA); natural products including antimitotic drugs such as paclitaxel, vinca alkaloids including vinblastine (VLB), vincristine, and vinorelbine, taxotere, estramustine, and estramustine phosphate; epipodophylotoxins such as etoposide and teniposide; antibiotics, such as actimomycin D, daunomycin (rubidomycin), doxorubicin, mitoxantrone, idarubicin, bleomycins, plicamycin (mithramycin), mitomycinC, and actinomycin; enzymes such as L-asparaginase, cytokines such as interferon (IFN)-gamma, tumour necrosis factor (TNF)-alpha, TNF-beta and GM-CSF, anti-angiogenic factors, such as angiostatin and endostatin, inhibitors of FGF or VEGF such as soluble forms of receptors for angiogenic factors, including soluble VGFNEGF receptors, platinum coordination complexes such as cisplatin and carboplatin, anthracenediones such as mitoxantrone, substituted urea such as hydroxyurea, methylhydrazine derivatives including N-methylhydrazine (MIH) and procarbazine, adrenocortical suppressants such as mitotane (o,p′-DDD) and aminoglutethimide; hormones and antagonists including adrenocorticosteroid antagonists such as prednisone and equivalents, dexamethasone and aminoglutethimide; progestin such as hydroxyprogesterone caproate, medroxyprogesterone acetate and megestrol acetate; estrogen such as diethylstilbestrol and ethinyl estradiol equivalents; antiestrogen such as tamoxifen; androgens including testosterone propionate and fluoxymesterone/equivalents; antiandrogens such as flutamide, gonadotropin-releasing hormone analogs and leuprolide; non-steroidal antiandrogens such as flutamide; kinase inhibitors, histone deacetylase inhibitors, methylation inhibitors, proteasome inhibitors, monoclonal antibodies, oxidants, anti-oxidants, telomerase inhibitors, BH3 mimetics, ubiquitin ligase inhibitors, stat inhibitors and receptor tyrosin kinase inhibitors such as imatinib mesylate (marketed as Gleevac or Glivac) and erlotinib (an EGF receptor inhibitor) now marketed as Tarveca; and anti-virals such as oseltamivir phosphate, Amphotericin B, and palivizumab.

[0234] Additionally, other T-cell checkpoint antagonists, like anti-Lag-3, anti-PD-1, anti-PD-L1, or inhibitors of IDO1/ID02 (indoleamine 2,3-dioxygenase) could also be used in combination with the present invention. These latter enzymes catabolize tryptophan in the tumor microenvironment, which impairs T-cell function. By using an anti-HVEM antibody, such as for example, a bispecific anti-HVEM antibody, or a CAR T-cells, in combination with a T-cell checkpoint antagonist may synergistically increase cancer cell killing within a tumor.

[0235] Various embodiments are disclosed above for an anti-HVEM antibody. Aspects and embodiments of the invention relating to an anti-HVEM antibody and optionally one or more other agents disclosed above include disclosure of the administration of the compounds or agents separately (sequentially or simultaneously) or in combination (co-formulated or mixed). For each aspect or embodiment, the specification further discloses a composition comprising the anti-HVEM antibody and optionally one or more other agents co-formulated or in admixture with each other and further discloses a kit or unit dose containing the anti-HVEM antibody. Optionally, such compositions, kits or doses further comprise one or more carriers in admixture with the agent or co-packaged for formulation prior to administration to an individual.

[0236] Various embodiments are also disclosed above for combinations of a check-point inhibitor, such as a PD-1 signaling inhibitor, and an anti-HVEM antibody. Aspects and embodiments of the invention relating to combinations of a PD-1 signaling inhibitor and anti-HVEM antibody and optionally one or more other agents disclosed above include disclosure of the administration of the compounds or agents separately (sequentially or simultaneously) or in combination (co-formulated or mixed). For each aspect or embodiment, the specification further discloses a composition comprising the PD-1 signaling inhibitor and anti-HVEM antibody and optionally one or more other agents co-formulated or in admixture with each other and further discloses a kit or unit dose containing the PD-1 signaling inhibitor and anti-HVEM antibody packaged together, but not in admixture. Optionally, such compositions, kits or doses further comprise one or more carriers in admixture with one or both agents or co-packaged for formulation prior to administration to a subject.

[0237] Various further aspects and embodiments of the present invention will be apparent to those skilled in the art in view of the present disclosure.

### EXAMPLES

[0238] The invention will now be further illustrated with reference to the following examples. It will be appreciated that what follows is by way of example only and that modifications to detail may be made while still falling within the scope of the invention.

### Example 1—Generation of Anti-HVEM Antibodies

[0239] The workflow shown in FIG. 1 illustrates the binding confirmation process after a repertoire of B cells have been screened for B cells of interest (e.g., B cells that may secret the antibodies of interest). The B cell screening can be performed with droplet-based microfluidic technology, such as for example, as described in G6rard et al., “High-throughput single-cell activity-based screening and sequencing of antibodies using droplet microfluidics,” Nature Biotechnology, volume 38, pages 715-721(2020) (herein incorporated by reference in its entirety).

[0240] To illustrate, human or immunized animal enriched B cells, and optionally further ex vivo activated, in cell culture medium are introduced into a microfluidic chip where they are encapsulated into microdroplets following a Poisson statistics distribution, such that no more than 5% of the droplet contains two cells. These droplets are <40 pL volume. Cells are co-encapsulated with bio-assay reagents including streptravidin-coated magnetic colloid beads and fluorescently-labeled antigen of interest, and optionally a fluorescently labelled detection reagent used to identify antibody secreting cells.

[0241] The encapsulated B cells in the droplets can be screened and sorted for B cells that produce secreted IgG antibodies, detected optionally with the detection reagent, that specifically bind to the fluorescently-labeled antigen of interest. The droplets of interest are deflected from main channel to sorting channel by surface acoustic wave mediated process. The B cells in these droplets of interest are then collected and subjected to single-cell reverse transcription with primers for VH and VL, as detailed, e.g., in Gérard et al. The cDNAs generated from each cell carry a different barcode, allowing cognate VH and VL pairs to be identified after next generation sequencing (NGS) to obtain the cDNA sequences.

[0242] To illustrate, the cDNA sequences can be analyzed using an IMGT V-gene database such as for example, the database described in G6rard et al. An exemplary sequence analysis may include: 1) after immune characterization of consensus reads by VDJFasta, reads containing frameshifts, stop-codons or lacking identifiable CDRs were filtered out. VH-VL pairing was carried out by identifying the most abundant VH and VL consensus sequence (by number of reads that contributed to that consensus) in each barcode cluster; 2) the paired VH and VL sequences must be larger than any other VH or VL present in the cluster by at least 1 read; 3) to minimize VH-VL mispairing, antibody sequences were only considered for further analysis if both the paired VH/VL consensus sequences comprised at least 25, 30, 40, 50, 60 or more reads; 4) low-level mispairing (wrong assignment of light chain with heavy chain) was removed by clustering all heavy chains with the same V-J gene combination and a CDR3 amino acid sequence within a hamming distance of 2 and using the paired light chain associated with the largest number of independent barcodes.

[0243] FIG. 2 summarizes the screening results with samples from 11 immunized mice. The results indicate that the mice that received a final protein boost produced more antibodies of interest (e.g., mice IDs. 206, 204, 205 and 207). “Fresh” refers to fresh plasma cells from the mice, as compared to “shipped overnight” (i.e., overnight shipped spleen) and memory activated B cells.

### Example 2—Expression of the Anti-HVEM Antibody

[0244] The anti-HVEM antibodies as described herein can be constructed using standard molecular biology techniques well known to the skilled artisan. For example, plasmids comprising a polynucleotide encoding an anti-HVEM antibody can be designed to express a polypeptide comprising the amino acid sequences disclosed in Tables 2-3.

[0245] It will be appreciated that Fab and F(ab′)2 and other fragments of the anti-HVEM antibodies may be used according to the methods disclosed herein. Such fragments are typically produced by proteolytic cleavage, using enzymes such as papain (to produce Fab fragments) or pepsin (to produce F(ab′)2 fragments). Alternatively, secreted protein-binding fragments can be produced through the application of recombinant DNA technology or through synthetic chemistry.

[0246] For in vivo use of antibodies in humans, it may be preferable to use “humanized” chimeric monoclonal antibodies. Such antibodies can be produced using genetic constructs derived from hybridoma cells producing the monoclonal antibodies described above. Methods for producing chimeric antibodies are known in the art. (See, for review, Morrison, Science 229:1202 (1985); Oi et al., BioTechniques 4:214 (1986); Cabilly et al., U.S. Pat. No. 4,816,567; Taniguchi et al., EP 171496; Morrison et al., EP 173494; Neuberger et al., WO 8601533; Robinson et al., WO 8702671; Boulianne et al., Nature 312:643 (1984); Neuberger et al., Nature 314:268 (1985).)

### Example 3: Membrane HVEM Expression Using Retrovirus

[0247] Flow Cytometry (FACS) analysis of a cell line expressing the HVEM receptor in its natural conformation is used to measure the serum titer and/or antibody binding. To create such a cell line, retroviral vectors can be used to stably integrate target HVEM gene into the host cell chromosome using standard techniques. By stably integrating the target gene into the host genome, the host cell will permanently and stably express the HVEM receptor without selection pressure and and the cell can be banked.

[0248] In this example, an internal ribosome entry site-enhanced green fluorescent protein (IRES-EGFP) sequence is cloned into a retroviral PMV vector. EGFP can be expressed with the target protein together and used as indicator for verifying the transfection effect or target protein expression level. EGFP can be used as indicator for verifying the transfection using Fluorescence microscope or FACS (EGFP use the same channel with FITC or 488 channel).

[0249] The HVEM sequence is cloned into the multiple cloning site of the retroviral vector pMV. This vector is then transformed into packaging cell, such as Plat-E cells, although many packing cell lines are publicly available with a chemical method, such as Lipofectamine LTR and Plus agent. The retrovirus encoding HVEM is created and secreted into the cell culture medium. The supernatant will be collected and directly be applied for transfection without super centrifugation or other concentrate processing.

[0250] Plates coated with Retronectin Protein solution are used as we have found that this protein can fix the virus to the plate surface without over-night supercentrifugation, thereby dramatically increasing the transfection efficiency. The supernatant containing retrovirus is added into the plate which is captured by the Retronectin and fixing the retrovirus to the plate surface.

[0251] A mouse pro-B, IL-3 dependent cell-line that grows in suspension (BaF3 cells) are added to the plate without any additional treatment for transfection. BaF3 also will be captured by the Retronectin protein, dramatically increasing the contact frequency of BaF3 cell and retrovirus leading to an increase in successful transfection. By performing a limited-dilution results in obtaining the top-3 single BaF3 cell clones with high EGFP/HVEM protein expression level and allows for the ability to banik a single clone.

### Example 4a: Measurement of Binding Affinity Via ELISA

[0252] For ELISA measurements, human HVEM recombinant protein (Sino Biological, 10334-H03H, 1 ug/ml, 100 ul/well) was coated to ELISA plate (Thermo Scientific, 469949, 4C overnight). HVEM antibody clone's concentration was diluted to 125 ng/ml and 100 ul was added to the ELISA plate after blocking with 3% BSA (200 ul/well, RT, 2 Hr) for 1 Hr at RT. Plate was washed with PBST; diluted HRP-anti-mouse IgG (Southern BioTech, 1030-05, 1:6000) with PBS containing 5% FBS was added 100 ul per well for 1 Hr at RT. TMB substrate (KPL, 52-00-00) 100 ul per well after washing and incubate at room temperature for 15 minutes; then stop the development by adding 100 ul stop solution (KPL, 50-85-06). Plate was read at 450 nm.

[0253] Data were obtained for antibodies Ab_001 to Ab_096 (see Table 1 for description of the antibodies) using a 96-well plate, with intensity of absorbance at 450 nm correlating with affinity of an antibody to the human HVEM. Bar graphs showing the intensities are provided in FIGS. 3a and 3b, with higher intensity indicating stronger binding to HVEM in the assay. As indicated in FIGS. 3a and 3b, intensities at 450 nm ranged from 0 to 4, with antibodies Ab_001, Ab_019, Ab_025, Ab_072, Ab_074, Ab_083, Ab_089, Ab_090, and Ab_095 showing intensities between 3.0 and 4.0, indicating relatively strong binding by ELISA; antibodies Ab_006, Ab_008, Ab_009, Ab_011, Ab_012, Ab_26, Ab_027, Ab_028, Ab_029, Ab_031, Ab_036, Ab_043, Ab_046, Ab_050, Ab_051, Ab_058, Ab_060, Ab_062, Ab_064, Ab_066, Ab_073, Ab_075, Ab_077, Ab_078, Ab_079, Ab_087, and Ab_096 showing intensities between 2.5 and 3.0, antibodies Ab_002, Ab_004, Ab_005, Ab_007, Ab_010, Ab_013, Ab_030, Ab_032, Ab_033, Ab_034, Ab_035, Ab_039, Ab_044, Ab_045, Ab_048, Ab_052, Ab_053, Ab_054, Ab_055, Ab_061, Ab_063, Ab_065, Ab_067, Ab_068, Ab_069, Ab_070, Ab_071, Ab_076, Ab_080, Ab_093, and Ab_094 showing intensities between 1.0 and 2.5, and antibodies Ab_003, Ab_014, Ab_015, Ab_016, Ab_017, Ab_018, Ab_020, Ab_021, Ab_022, Ab_023, Ab_024, Ab_037, Ab_038, Ab_040, Ab_041, Ab_042, Ab_049, Ab_056, Ab_057, Ab_059, Ab_077, Ab_082, Ab_084, Ab_085, Ab_086, Ab_088, Ab_091, and Ab_092 showing intensities between 0.01 and 0.5, indicating weak to no binding.

[0254] ELISA was also used to assess comparative binding of antibodies to human, cynomolgus monkey, and murine HVEM. Results are shown in Table 5 below (with higher numbers indicating stronger binding).

TABLE 5

| Clone | Human | Cyno | Mouse |
|---|---|---|---|
| Ab_1 | 3.299 | 0.072 | 0.057 |
| Ab_2 | 2.801 | 1.981 | 0.043 |
| Ab_3 | 2.397 | 2.285 | 0.051 |
| Ab_4 | 2.421 | 0.062 | 0.044 |
| Ab_5 | 2.442 | 0.063 | 0.048 |
| Ab_6 | 3.138 | 2.688 | 0.043 |
| Ab_7 | 2.557 | 0.739 | 0.042 |
| Ab_8 | 3.397 | 2.937 | 0.077 |
| Ab_9 | 3.113 | 1.878 | 0.047 |
| Ab_10 | 2.679 | 0.068 | 0.044 |
| Ab_11 | 3.161 | 2.97 | 0.049 |
| Ab_12 | 3.081 | 2.893 | 0.044 |
| Ab_13 | 3.003 | 2.74 | 0.048 |
| Ab_14 | 0.05 | 0.064 | 0.049 |
| Ab_15 | 0.045 | 0.058 | 0.042 |
| Ab_16 | 0.047 | 0.061 | 0.042 |
| Ab_17 | 0.051 | 0.06 | 0.044 |
| Ab_18 | 0.05 | 0.059 | 0.043 |
| Ab_20 | 0.049 | 0.064 | 0.043 |
| Ab_21 | 0.046 | 0.061 | 0.042 |
| Ab_22 | 0.157 | 0.165 | 0.183 |
| Ab_23 | 0.045 | 0.057 | 0.042 |
| Ab_24 | 0.048 | 0.063 | 0.044 |
| Ab_25 | 3.01 | 3.157 | 0.045 |
| Ab_26 | 3.103 | 0.088 | 0.043 |
| Ab_27 | 3.126 | 0.064 | 0.043 |
| Ab_28 | 3.16 | 2.187 | 0.05 |
| Ab_29 | 3.328 | 0.068 | 0.045 |
| Ab_30 | 3.082 | 2.978 | 0.046 |
| Ab_31 | 3.084 | 3.06 | 0.042 |
| Ab_32 | 3.04 | 2.87 | 0.045 |
| Ab_33 | 3.097 | 3.015 | 0.043 |
| Ab_34 | 3.195 | 0.466 | 0.045 |
| Ab_35 | 3.198 | 0.616 | 0.045 |
| Ab_36 | 3.257 | 0.079 | 0.046 |
| Ab_37 | 0.059 | 0.06 | 0.043 |
| Ab_38 | 0.049 | 0.06 | 0.043 |
| Ab_39 | 2.867 | 3.03 | 0.042 |
| Ab_40 | 0.069 | 0.098 | 0.05 |
| Ab_41 | 0.059 | 0.076 | 0.045 |
| Ab_42 | 0.049 | 0.062 | 0.046 |
| Ab_43 | 3.22 | 0.058 | 0.043 |
| Ab_44 | 2.869 | 0.384 | 0.706 |
| Ab_45 | 3.079 | 2.897 | 0.042 |
| Ab_46 | 2.937 | 3.034 | 0.042 |
| Ab_47 | 1.19 | 0.743 | 0.051 |
| Ab_48 | 2.495 | 0.826 | 0.044 |
| Ab_49 | 1.074 | 0.065 | 0.044 |
| Ab_50 | 3.016 | 0.094 | 0.047 |
| Ab_51 | 3.179 | 0.563 | 0.043 |
| Ab_52 | 2.881 | 2.324 | 0.042 |
| Ab_53 | 2.893 | 2.099 | 0.042 |
| Ab_54 | 2.496 | 2.232 | 0.042 |
| Ab_55 | 2.946 | 2.212 | 0.042 |
| Ab_56 | 0.452 | 0.06 | 0.043 |
| Ab_57 | 1.066 | 1.059 | 0.045 |
| Ab_58 | 3.164 | 0.064 | 0.043 |
| Ab_59 | 0.462 | 0.405 | 0.043 |
| Ab_60 | 3.087 | 3.034 | 0.044 |
| Ab_61 | 2.984 | 3.026 | 0.043 |
| Ab_62 | 2.949 | 2.984 | 0.045 |
| Ab_63 | 3.103 | 3.133 | 0.043 |
| Ab_64 | 3.072 | 0.987 | 0.044 |
| Ab_65 | 3.242 | 1.525 | 0.044 |
| Ab_66 | 3.282 | 0.883 | 0.044 |
| Ab_67 | 3.052 | 3.042 | 0.047 |
| Ab_68 | 3.031 | 3.038 | 0.044 |
| Ab_69 | 3.132 | 3.039 | 0.054 |
| Ab_70 | 3.227 | 3.101 | 0.062 |
| Ab_71 | 3.077 | 2.983 | 0.047 |
| Ab_72 | 3.361 | 0.062 | 0.045 |
| Ab_73 | 3.24 | 0.062 | 0.045 |
| Ab_74 | 3.26 | 0.06 | 0.044 |
| Ab_75 | 3.043 | 3.044 | 0.048 |
| Ab_76 | 2.892 | 2.96 | 0.044 |
| Ab_77 | 0.147 | 0.079 | 0.043 |
| Ab_78 | 3.077 | 0.063 | 0.046 |
| Ab_79 | 2.966 | 0.062 | 0.054 |
| Ab_80 | 3.072 | 2.259 | 0.048 |
| Ab_81 | 1.589 | 0.076 | 0.048 |
| Ab_82 | 0.844 | 0.06 | 0.044 |
| Ab_83 | 3.193 | 0.06 | 0.043 |
| Ab_84 | 0.171 | 0.061 | 0.043 |
| Ab_85 | 0.049 | 0.061 | 0.046 |
| Ab_86 | 0.575 | 0.065 | 0.044 |
| Ab_87 | 3.218 | 0.069 | 0.045 |

[0255] Binding of antibodies to human HVEM may also be assessed by flow cytometry and by bio-layer interferometry (BLI).

### Example 4b: Measurement of Binding Affinity by Bio-Layer Interferometry (BLI) by an OctetRed96® Assay

[0256] Binding of antibodies to HVEM may also be determined by bio-layer interferometry (BLI) on an OctetRed96@ system (Sartorius). (See http://www.fortebio.com/bli_technology.html for general description of a BLI assay.) For this experiment, murine anti-human HVEM antibodies were captured from culture supernatant using anti-mouse IgG Fc capture and immobilized to dip and read biosensors. Sensors were then dipped into a solution of 200 nM His-tagged human HVEM in phosphate-buffered saline (PBS). Probes were dipped into PBS assay buffer and the dissociation rate (k_{off}) was measured. The association rate (kₒₙ) and affinity (K_{D}) were determined by curve fitting analysis.

[0257] Binding data for exemplary antibodies are provided above in Table 1.

### Example 5—Competitive Assays with HVEM Ligands BTLA and LIGHT

[0258] The competitive activity of HVEM antibody to BTLA or LIGHT was evaluated with ELISA-based competitive assay. Briefly Human HEVM recombinant protein (Sino Biological, 10334-H02H, 4 ug/ml, 100 ul/well) was coated to ELISA plate (Thermo Scientific, 469949, 4C overnight). A pre-mixture of HVEM antibody clone with seral dilution and 400 nM BTLA-His (R&D systems, 9235-BT-050) or LIGHT-His (SinoBiological, 10386-H07H) recombinant protein was made and added to the ELISA plate after blocking with 3% BSA (200 ul/well, RT 2 Hr) for 1 Hr at RT. The serial dilutions of HVEM antibody clone involve 7 different concentrations, with a 3-fold dilution performed start from 100 nM for BTLA or 325 nM for LIGHT competitive assay. The concentration was the final concentration. Plate was washed with PBST; diluted HRP-anti-His (Biolegend, 652504, 1:1000) with PBS containing 5% FBS was added 100 ul per well for 1 Hr at RT. TMB substrate (KPL, 52-00-00) 100 ul per well after washing and incubate at room temperature for 15 minutes; then stop the development by adding 100 ul stop solution (KPL, 50-85-06). Plate was read at 450 nm. The IC50 was calculated using GraphPad Prism software (GraphPad Software, Inc. San Diego, CA, USA).

[0259] As shown in Table 1, binding to HVEM to inhibit HVEM's ligands, LIGHT and BTLA, from binding to HVEM was confirmed for a number of the disclosed antibodies.

[0260] Variations, modifications, and other implementations of what is described herein will occur to those of ordinary skill in the art without departing from the spirit and scope of the invention and the claims. All of the patents, patent applications, international applications, and references identified are expressly incorporated herein by reference in their entireties.

The application's sequence listing, which the Patent Office published only in electronic form, follows.

SEQUENCE LISTING (1449 sequences)

SEQ ID NO: 1 - protein, 113 aa, Artificial Sequence
  Full-Length sequence of the Heavy Chain of H5S14-12AH as described in Table 3.
QVQLQQSGAELVRPGTSVKISCKASGNIFTNSWLGWIKQRPGHGLEWIGDVYPGGGYNKYNEKFKGKATLTIDTSASTAYMQLSRLTSEDSGVYFCAGAMDYWGQGTSVTVSS

SEQ ID NO: 2 - protein, 113 aa, Artificial Sequence
  Full-Length sequence of the Heavy Chain of H5S14-13AH as described in Table 3.
QVQLQQSGAELVRPGTSVKISCKASGYIFTNSWLGWIKQRPGHGLEWIGDVYPGGGYNKYNEKFKGKATLTIDTSASTAYMQLSRLTSEDSAVYFCAGAMDYWGQGTSVTVSS

SEQ ID NO: 3 - protein, 113 aa, Artificial Sequence
  Full-Length sequence of the Heavy Chain of H5S14-14AH as described in Table 3.
QVQLQQSGAELVRPGTSVKISCKASGYIFTNYWLGWIKQRPGHGLEWIGDVYPGGGYNKYNEKFKGKATLTVDTSASTAYMQLSRLTSEDSAVYFCAGAMDYWGQGTSVTVSS

SEQ ID NO: 4 - protein, 113 aa, Artificial Sequence
  Full-Length sequence of the Heavy Chain of H5S14-19AH as described in Table 3.
QVQLQQSGAELVRPGTSVKISCKASGYTFTNSWLGWVKQRPGHGLEWIGDIYPGGGYNKYNEKFKGKATLTADTSSSTAYMQLSSLTSEDSAVYFCAGAMDSWGQGTSVTVSS

SEQ ID NO: 5 - protein, 113 aa, Artificial Sequence
  Full-Length sequence of the Heavy Chain of H5S15-31AH as described in Table 3.
QVQLQQSGAELVRPGTSVKISCKASGYAFTNSWLGWVKQRPGHGLEWIGDIYPGGGYNKYNEKFKGKATLTADTSSSTAYMQLSSLTSEDSAVYFCAGALDYWGQGTSVTVSS

SEQ ID NO: 6 - protein, 113 aa, Artificial Sequence
  Full-Length sequence of the Heavy Chain of H5S15-35AH as described in Table 3.
QVQLQQSGAELVRPGTSVKISCKASGYTFTNSWLGWVKQRPGHGLEWIGDIYPGGGYNKYNEKFKGKATLTADTSSSTAYMQLGSLTSEDSAVYFCAGAMDYWGQGTSVTVSS

SEQ ID NO: 7 - protein, 113 aa, Artificial Sequence
  Full-Length sequence of the Heavy Chain of H5S20-23AH as described in Table 3.
QVQLQQSGAELVRPGTSVKISCKASGYTLINSWLGWVKQRPGHGLEWIGDIYPGGGYNKYNEKFKGKAILTADTSSSTAYMQLSSLTSEDSAVYFCAGAMDYWGQGTSVTVSS

SEQ ID NO: 8 - protein, 113 aa, Artificial Sequence
  Full-Length sequence of the Heavy Chain of H5S20-24AH as described in Table 3.
QVQLQQSGAELVRPGTSVKISCKASGYTFTNYWLGWVKQRPGHGLEWIGDIYPGGGYIIYNEKFKGKATLTVDSSATTAYIQLNSLTSEDSAVYFCAGAMDHWGQGTSVTVSS

SEQ ID NO: 9 - protein, 113 aa, Artificial Sequence
  Full-Length sequence of the Heavy Chain of H5S20-28AH as described in Table 3.
QVQLQQSGAEVVRPGTSVQISCKASGFTLTNYWLGWVKQRPGHGLEWIGDIYPGGGYTNYNEKFKGKATLTADTSSNTAYMQLSGLTSEDSAVYFCAGAMDKWGQGTSVTVSS

SEQ ID NO: 10 - protein, 113 aa, Artificial Sequence
  Full-Length sequence of the Heavy Chain of H5S20-28BH as described in Table 3.
QVQLQQSGAEVVRPGTSVKISCKASGFTLTNYWLGWVKQRPGHGLEWIGDIYPGGGYTNYNEKFKGKATLTADTSSNTAYMQLSGLTSEDSAVYFCAGAMDKWGQGTSVTVSS

SEQ ID NO: 11 - protein, 113 aa, Artificial Sequence
  Full-Length sequence of the Heavy Chain of H5S20-30AH as described in Table 3.
QVQLQQSGTEVVRPGTSVKISCKASGFTLTNYWLGWVKQRPGHGLEWIGDIYPGGGYANYNEKFKGKATLTADTSSNTAYMQLSGLTSEDSAVYFCAGAMDKWGQGTSVTVSS

SEQ ID NO: 12 - protein, 113 aa, Artificial Sequence
  Full-Length sequence of the Heavy Chain of H5S20-32AH as described in Table 3.
QVQLQQSGAELVRPGTSVKISCKASGYTFTNYWLGWVKQWPGHGLEWIGDIYPGGGYNIYNEKFKGKATLTVDTSSSTAYMQLSSLTSEDSAVYFCAGAMDYWGQGTSVTVSS

SEQ ID NO: 13 - protein, 113 aa, Artificial Sequence
  Full-Length sequence of the Heavy Chain of H5S20-32BH as described in Table 3.
QVQLQQSGAELVRPGTSVKISCKASGYTFTNYWLGWVKQRPGHGLEWIGDIYPGGGYNIYNEKFKGKATLTVDTSSSTAYMQLSSLTSEDSAVYFCAGAMDYWGQGTSVTVSS

SEQ ID NO: 14 - protein, 113 aa, Artificial Sequence
  Full-Length sequence of the Heavy Chain of H5S20-32CH as described in Table 3.
QVQLQQSGAELVRPGTSVKISCKASGYTFTNYWLGWVKQRPGHGLEWIGDIYPGGGYNIYNEKFKGKATLTIDTSSSTAYMQLSSLTSEDSAVYFCAGAMDYWGQGTSVTVSS

SEQ ID NO: 15 - protein, 113 aa, Artificial Sequence
  Full-Length sequence of the Heavy Chain of H5S20-33AH as described in Table 3.
QVQLQQSGAELVRPGTSVRISCKASGYTLTNSWLGWVKQRPGHGLEWIGDIYPGGGYTKYNENFKGKATLTADTSSSTAYMQLSRLTSEDSGVYFCVGAVAYWGQGTSVTVSS

SEQ ID NO: 16 - protein, 113 aa, Artificial Sequence
  Full-Length sequence of the Heavy Chain of H5S20-35AH as described in Table 3.
QVQLQQSGAELVRPGTSVKISCKASGYTFTNYWLGWVKQRPGHGLEWIGDIYPGGGYNKYNEKFKGKATLTADTSSSTAYMQLSSLTSEDSAVYFCAGAMDYWGQGTSVTVSS

SEQ ID NO: 17 - protein, 113 aa, Artificial Sequence
  Full-Length sequence of the Heavy Chain of H5S20-36AH as described in Table 3.
QVQLQQSGAELVRPGTSVKMSCKASGYTFTNSWLGWVKQRPGHGLEWIGDIYPGGGYIKYNEKFKGKATLTADTSSSTAYMQLSSLTSEDSAVYFCAGAMDYWGQGTSVTVSS

SEQ ID NO: 18 - protein, 113 aa, Artificial Sequence
  Full-Length sequence of the Heavy Chain of H5S20-38AH as described in Table 3.
QVQLQQSGAELVRPGTSVRISCKASGYTLTNSWLGWVKQRPGHGLEWIGDIYPGGGYTKYNEKFKGKATLTADTSSSTAYMQLSSLTSEDSAVYFCAGAVAYWGQGTSVTVSS

SEQ ID NO: 19 - protein, 113 aa, Artificial Sequence
  Full-Length sequence of the Heavy Chain of H5S20-3BH as described in Table 3.
QVQLQQSGAELVRPGTSVKISCKASGYTFTNSWLGWVKQRPGHGLEWIGDIYPGGGYNKYNEKFRGKATLTADTSSSTAYMQLSSLTSEDSAVYFCAGAMDYWGQGTSVTVSS

SEQ ID NO: 20 - protein, 113 aa, Artificial Sequence
  Full-Length sequence of the Heavy Chain of H5S20-3CH as described in Table 3.
QVQLQQSGAELVRPGTSVKISCKASGYTFTNSWLGWVKQRPGHGLEWIGDIYPGGGYNKYNEKFKGKATLTADTSSSTAYMQLSSLTSEDSAVYFCAGAMDYWGQGTSVTVSS

SEQ ID NO: 21 - protein, 113 aa, Artificial Sequence
  Full-Length sequence of the Heavy Chain of H5S20-41AH as described in Table 3.
QVQLQQSGAELVRPGTSVKISCKASGYRFTNYWLGWVKQRPGHGLEWIGDIYPGGGYNKYNEKFKGKATLTADTSSSTAYMQLSSLTSEDSAVYFCAGAMDYWGQGTSVTVSS

SEQ ID NO: 22 - protein, 113 aa, Artificial Sequence
  Full-Length sequence of the Heavy Chain of H5S20-41BH as described in Table 3.
QVQLQQSGAELVRPGTSVKISCKASGYRFTNYWLGWIKQRPGHGLEWIGDIYPGGGYNKYNEKFKGKATLTADTSSSTAYMQLSSLTSEDSAVYFCAGAMDYWGQGTSVIVSS

SEQ ID NO: 23 - protein, 113 aa, Artificial Sequence
  Full-Length sequence of the Heavy Chain of H5S20-43AH as described in Table 3.
QVQLQQSGAELVRPGTSVMISCKASGYTFTNYWLGWVKQRPGHGLEWIGDIYPGGGYIIYNEKFKGKATLTVDSSATTAYMQLSSLTSEDSAVYFCAGAMDYWGQGTSVTVSS

SEQ ID NO: 24 - protein, 113 aa, Artificial Sequence
  Full-Length sequence of the Heavy Chain of H5S20-48AH as described in Table 3.
QVQLQQSGAELVRPGTSVRISCKASGYTLTNSWLGWVKQRPGHGLEWIGDIYPGGGYNKYNEKFKGKATLTADTSSSTAYMQLSSLTSEDSAVYFCAGAVAYWGQGTSVTVSS

SEQ ID NO: 25 - protein, 113 aa, Artificial Sequence
  Full-Length sequence of the Heavy Chain of H5S20-50AH as described in Table 3.
QVQLQQSGAELVRPGTSVKISCKASGYRFTNSWLGWVKQRPGHGLEWIGDIYPGGGYNKYNEKFKGKATLTADTSSNTAYMQLSSLTSEDSAVYFCAGALDYWGQGTSVTVSS

SEQ ID NO: 26 - protein, 113 aa, Artificial Sequence
  Full-Length sequence of the Heavy Chain of H5S20-54AH as described in Table 3.
QVQLQQSGAEVVRPGTSVKISCKASGFTLTNYWLGWVKQRPGHGLEWIGDIYPGGGYTNYNEKFKGKATLTADTSSNTAYMQLSGLTSEDSAVYFCAGAMDNWGQGTSVTVSS

SEQ ID NO: 27 - protein, 113 aa, Artificial Sequence
  Full-Length sequence of the Heavy Chain of H5S20-57AH as described in Table 3.
QVQLQQSGAELVRPGTSVKISCKASGYTFTNSWLGWVKQRPGHGLEWIGDIYPGGGYNKYNEKFKGKATLTADTSSSTAYMQLSSLTSEDSAVYFCIGAMDYWGQGTSVTVSS

SEQ ID NO: 28 - protein, 113 aa, Artificial Sequence
  Full-Length sequence of the Heavy Chain of H5S20-60AH as described in Table 3.
QVQLQQSGAELVRPGTSVRISCKASGYTLTNSWLGWVKQRPGHGLEWIGDIYPGGGYTKYNENFKGKATLSADTSSSTAYMQLSSLTSGDSAVYFCAGAMAYWGQGTSVTVSS

SEQ ID NO: 29 - protein, 113 aa, Artificial Sequence
  Full-Length sequence of the Heavy Chain of H5S20-62AH as described in Table 3.
QVQLQQSGAELVRPGTSVKISCKASGYSFTNYWLGWVKQRPGHGLEWIGDIYPGGGYNMYNEKFKGKATLTVDTSSSTAYMQLSSLTSEDSAVYFCAGAMDYWGQGTSVTVSS

SEQ ID NO: 30 - protein, 113 aa, Artificial Sequence
  Full-Length sequence of the Heavy Chain of H5S20-7AH as described in Table 3.
QVQLQQSGAELVRPGTSVKISCKASGYRFTNSWLGWIKQRPGHGLEWIGDIYPGGGYNKYNEKFRGKATLTADTSSSTAYMQLSSLTSEDSAVYFCAGAMDSWGQGTSVTVSS

SEQ ID NO: 31 - protein, 113 aa, Artificial Sequence
  Full-Length sequence of the Heavy Chain of H5S20-7BH as described in Table 3.
QVQLQQSGAELIRPGTSVKISCKASGYRFTNSWLGWIKLRPGHGLEWIGDIYPGGGYNKYNEKFRGKATLTADTSSSTAYMQLSSLTSEDSAVYFCAGAMDSWGQGTSVTVSS

SEQ ID NO: 32 - protein, 113 aa, Artificial Sequence
  Full-Length sequence of the Heavy Chain of ITI_047H as described in Table 3.
QVQLQQSGAELVRPGTSVKISCKASGYTFTNSWLGWVKQRPGHGLEWIGDIYPGGGYNKYNEKFKGKATLTADTSSSTAYMQLSSLTSEDSGVYFCAGAMDYWGQGTAVTVSS

SEQ ID NO: 33 - protein, 113 aa, Artificial Sequence
  Full-Length sequence of the Heavy Chain of ITI_053H as described in Table 3.
QVQLQQSGAELVRPGTSVKISCKASGYAFTNSWLGWVRQRPGHGLEWIGDIYPGGGYNKYNEKFKGKATLTADTSSSTAYMQLSSLTSEDSAVYFCAGALDYWGQGTSVTVSS

SEQ ID NO: 34 - protein, 119 aa, Artificial Sequence
  Full-Length sequence of the Heavy Chain of H5S14-11AH as described in Table 3.
EVKLVESGGGLVKPGGSLRLSCAASGFTFSSFAMSWIRQTPEKGLEWVASITTGGSSYSPDSLKGRFTISRDNVRNIVYLQMSSLRSEDTAMYACARGGGGNYFWFAYWGQGTLVTVSA

SEQ ID NO: 35 - protein, 120 aa, Artificial Sequence
  Full-Length sequence of the Heavy Chain of H5S14-8AH as described in Table 3.
EVKLVESGGDLVKPGGSLKLSCAASGFTFSNYAMSWVRQTPEKRLEWVASISTGGTTSYYSDSVKGRFTISRDNARNILYLQMSSLRSEDTAMYYCARGGGGNYFWFTYWGQGTLVTISA

SEQ ID NO: 36 - protein, 120 aa, Artificial Sequence
  Full-Length sequence of the Heavy Chain of H5S15-10AH as described in Table 3.
DVQLVESGGGLVQPGGSRKLSCAASGFTFSSFGMHWIRQAPEKGLEWVASISSGSSTIYFADTVKGRFTISRDNPKNTLFLQMTSLRSEDTAMYYCARGAYGNFAWFPYWGQGTLVTVSA

SEQ ID NO: 37 - protein, 120 aa, Artificial Sequence
  Full-Length sequence of the Heavy Chain of H5S15-16AH as described in Table 3.
DVQLVESGGGLVQPGGSRKLSCAASGFTFSSFGMHWVRQAPEKGLEWVAHISSGSSTIYYADTVKGRFTISRDNPKNTLFLQMTSLRSEDTAMYYCARGAYGNFAWFPYWGQGTLVTVSA

SEQ ID NO: 38 - protein, 120 aa, Artificial Sequence
  Full-Length sequence of the Heavy Chain of H5S15-16BH as described in Table 3.
DVQLVESGGGLVQPGGSRKLSCAASGFTFSSFGMHWVRQAPEKGLEWVAHISSGSSTIYYADTVKGRFTISRDNPKNTLFLQMTSLRSEDTAMYYCARGAYGNFAWFPYWGQGTLVTVST

SEQ ID NO: 39 - protein, 120 aa, Artificial Sequence
  Full-Length sequence of the Heavy Chain of H5S15-20AH as described in Table 3.
DVQLVESGGGLVQPGGSRKLSCAASGFTFSSFGMHWVRQAPEKGLEWVASISSGSSTIYYADTVKGRFTISRDNPKNTLFLQMTSLRSEDTAMYYCARGAYGNFAWFAFWGQGTLVTVSA

SEQ ID NO: 40 - protein, 120 aa, Artificial Sequence
  Full-Length sequence of the Heavy Chain of H5S15-9AH as described in Table 3.
DVQLVESGGGLVQPGGSRKLSCAASGFTFSDFGMHWVRQAPEKGLEWVAHISSGSSTIYYADTVKGRFTISRDNPKNTLFLQMTSLRSEDTAMYYCARGAYGNFAWFPYWGQGTLVTVSA

SEQ ID NO: 41 - protein, 117 aa, Artificial Sequence
  Full-Length sequence of the Heavy Chain of H5S20-11AH as described in Table 3.
EVKLVESGGGLVKPGGSLKLSCAASGFTFSSYAMSWVRQTPETRLEWVASISSGGNTFYPDSVKGRFTISRDNVRDILYLQMSSLRSEDTAMYFCTRGGYGSSYVIWGQGTTVTVSS

SEQ ID NO: 42 - protein, 117 aa, Artificial Sequence
  Full-Length sequence of the Heavy Chain of H5S20-11BH as described in Table 3.
EVKLVESGGGLVKPGGSLKLSCAASGFTFSSYAMSWVRQTPETRLEWVASISSGGNTFYPDSVKGRFTISRDNVRDILYLQMSSLRSEDTAMYFCTRGGYGSSYVIWGQGTTLTVSS

SEQ ID NO: 43 - protein, 117 aa, Artificial Sequence
  Full-Length sequence of the Heavy Chain of H5S20-11CH as described in Table 3.
EVKLVESGGGLVKPGGSLKLSCAASGFTFSSYAMSWVRQTPETRLEWVASISSGGNTFYPDSVKGRFTISRDDVRDILYLQMSSLRSEDTAMYFCTRGGYGSSYVIWGQGTTLTVSS

SEQ ID NO: 44 - protein, 117 aa, Artificial Sequence
  Full-Length sequence of the Heavy Chain of H5S20-14AH as described in Table 3.
EVKLVESGGGLVKPGGSLKLSCAASGFTFSSYAMSWVRQTPETRLEWVASISSGGNTYYPDSVKGRFTISRDNVRNILYLQMSSLRSEDTAMYFCTRGGYGSSYVIWGQGTTLTVSS

SEQ ID NO: 45 - protein, 117 aa, Artificial Sequence
  Full-Length sequence of the Heavy Chain of H5S20-14BH as described in Table 3.
EVKLVESGGGLVKPGGSLKLSCAASGFTFSSYAMSWVRQTPETRLEWVASISSGGNTYYPDSVKGRFTISRDDVRNILYLQMSSLRSEDTAMYFCTRGGYGSSYVIWGQGTTLTVSS

SEQ ID NO: 46 - protein, 117 aa, Artificial Sequence
  Full-Length sequence of the Heavy Chain of H5S20-14CH as described in Table 3.
EVKLVESGGGLVKPGGSLKLSCAASGFTFSSYAMSWVRQTPETRLEWVASISSGGNTYYPDSVKGRFTISRDNVRDILYLQMSSLKSEDTAMYFCTRGGYGSSYVIWGQGTTLTVSS

SEQ ID NO: 47 - protein, 117 aa, Artificial Sequence
  Full-Length sequence of the Heavy Chain of H5S20-14DH as described in Table 3.
EVKLVESGGGLVMPGGSLKLSCAASGFTFSSYAMSWVRQTPETRLEWVASISSGGNTYYPDSVKGRFTISRDNVRNILYLQMSSLRSEDTAMYFCTRGGYGSSYVIWGQGTTLTVSS

SEQ ID NO: 48 - protein, 117 aa, Artificial Sequence
  Full-Length sequence of the Heavy Chain of H5S20-1AH as described in Table 3.
EVKLVESGGGLVKPGGSLKLSCAASGFTFSSYAMSWVRQTPETRLEWVASISSGGDTFYRDSVKARFTISRDDVRDILYLQMSSLRSEDTAMYFCTRGGYGSSFVIWGQGTTLTVSS

SEQ ID NO: 49 - protein, 117 aa, Artificial Sequence
  Full-Length sequence of the Heavy Chain of H5S20-29AH as described in Table 3.
EVKLVESGGGLVKPGGSLKLSCAASGFTFSSYAMSWVRQTPETRLEWVASISSGGNTFYPDSVKGRFTISRDDVRDILYLQMSSLRSEDTAMYFCTRGGYGSSFVIWGQGTTLTVSS

SEQ ID NO: 50 - protein, 117 aa, Artificial Sequence
  Full-Length sequence of the Heavy Chain of H5S20-37AH as described in Table 3.
EVKLVESGGGLVKPGGSLKLSCAASGFTFSSYAMSWVRQTPETRLEWVASISSGGKTFYPDSVKGRFTISRDNVRDILYLQMSSLRSEDTAMYFCTRGGYGSSYVIWGQGTTLTVSS

SEQ ID NO: 51 - protein, 117 aa, Artificial Sequence
  Full-Length sequence of the Heavy Chain of H5S20-39AH as described in Table 3.
EVKLVESGGGLVKPGGSLKLSCAASGFTFSSYAMSWVRQTPETRLEWVASISSGGNTYYPDSVKGRFTISRDNVRNILYLQMSSLRSEDTAMYFCTRGGYGSSHVIWGQGTTLTVSS

SEQ ID NO: 52 - protein, 117 aa, Artificial Sequence
  Full-Length sequence of the Heavy Chain of H5S20-40AH as described in Table 3.
EVKLVESGGGLVKPGGSLKLSCAASGFTFSNYAMSWVRQTPETRLEWVASISSGGNTYYPDSVKGRFTISRDNVRNILYLQMSSLRSEDTAMYFCTRGGYGSSYVIWGQGTTLTVSS

SEQ ID NO: 53 - protein, 117 aa, Artificial Sequence
  Full-Length sequence of the Heavy Chain of H5S20-4AH as described in Table 3.
EVKLVESGGGLMKPGGSLKLSCAASGFTFSSYAMSWVRQTPETRLEWVASISSGGSTYYPDSVKGRFTISRDNVRNILYLQMSSLRSEDTAMYFCTRGGYGSSYVIWGQGTTLTVSS

SEQ ID NO: 54 - protein, 117 aa, Artificial Sequence
  Full-Length sequence of the Heavy Chain of H5S20-4BH as described in Table 3.
EVKLVESGGGLVKPGGSLKLSCAASGFTFSSYAMSWVRQTPETRLEWVASISSGGSTYYPDSVKGRFTISRDNVRNILYLQMSSLRSEDTAMYFCTRGGYGSSYVIWGQGTTLTVSS

SEQ ID NO: 55 - protein, 117 aa, Artificial Sequence
  Full-Length sequence of the Heavy Chain of H5S20-61AH as described in Table 3.
EVKLVESGGGLVKPGGSLKLSCAASGFTFSSYAMSWVRQTPETRLEWVASISSGGSTYYPDSVKGRFTISRDNVRNILYLQMSSLRSEDTAMYFCTRGGYGSSHVIWGQGTTLTVSS

SEQ ID NO: 56 - protein, 117 aa, Artificial Sequence
  Full-Length sequence of the Heavy Chain of H5S20-6AH as described in Table 3.
EVKLVESGGGLVKPGGSLKLSCAASGFTFSSFAMSWVRQTPEKRLEWVASISSGGNTYYPDNVKGRFTISRDNAGNILYLQMSSLRSEDTAMYYCARGGYGSSYVIWGQGTTLTVSS

SEQ ID NO: 57 - protein, 120 aa, Artificial Sequence
  Full-Length sequence of the Heavy Chain of H5S19-12BH as described in Table 3.
QVQLKESGPGLVAPSRSLSITCTVSGFSLTTYGVHWVRQPPGKGLEWLGVIWAGGITNYNSALMSRLTISNDNSRSQVFLKMNSLQTDDTAMYYCARDWERDSSGPFPYWGQGTLVTVSA

SEQ ID NO: 58 - protein, 120 aa, Artificial Sequence
  Full-Length sequence of the Heavy Chain of H5S19-12CH as described in Table 3.
QVQLKESGPGLVAPSRSLSITCTVSGFSLTTYGVHWVRQPPGKGLEWLGVIWAGGITNYNSALMSRLSISNDNSRSQVFLKMNSLQTDDTAMYYCARDWERDSSGPFPYWGQGTLVTVSA

SEQ ID NO: 59 - protein, 120 aa, Artificial Sequence
  Full-Length sequence of the Heavy Chain of H5S19-14AH as described in Table 3.
QVQLKESGPGLVAPSQSLSITCTVSGFSLTSYGVHWVRQPPGKGLEWLGVIWAGGITNYNSALMSRLSISNDNSRSQVFLKMNSLQTDDTAMYYCARDWERDSSGPFAYWGQGTLVTVSA

SEQ ID NO: 60 - protein, 120 aa, Artificial Sequence
  Full-Length sequence of the Heavy Chain of H5S19-14BH as described in Table 3.
QVQLKESGPGLVAPSQSLSITCTVSGFSLTSYGVHWVRQPPGKGLEWLGVIWAGGITNYNSALMSRLSINNDNSRSQVFLKMNSLQTDDTAMYYCARDWERDSSGPFAYWGQGTLVTVSA

SEQ ID NO: 61 - protein, 120 aa, Artificial Sequence
  Full-Length sequence of the Heavy Chain of H5S19-17AH as described in Table 3.
QVQLKESGPGLVAPSQSLSITCTVSGFSLTTYGVHWVRQPPGKGLEWLGVIWAGGITNYNSALMSRLSISKDNSKSQVFLKMNSLQTGDTAMYYCARDWERDSSGPFAYWGQGTLVTVSA

SEQ ID NO: 62 - protein, 120 aa, Artificial Sequence
  Full-Length sequence of the Heavy Chain of H5S19-18AH as described in Table 3.
QVQLKESGPGLVAPSQSLSITCTVSGFSLTIYGVHWVRQPPGKGLEWLGVIWAGGIINYNSALMSRLSISKDNSKSQVFLKMNSLQSDDTAMYYCARDWERDSSGPFAYWGQGTLVTVSA

SEQ ID NO: 63 - protein, 120 aa, Artificial Sequence
  Full-Length sequence of the Heavy Chain of H5S19-20AH as described in Table 3.
QVQLKESGPGLVAPSQSLSITCTVSGFSLTSYGVHWVRQPPGKGLEWLGVIWAGGITNYNSALMSRLSISKDNSKSQVFLKMNSLQTDDTAMYYCARDWERDSSGPFVYWGQGTLVTVSA

SEQ ID NO: 64 - protein, 120 aa, Artificial Sequence
  Full-Length sequence of the Heavy Chain of H5S19-20BH as described in Table 3.
QVQLKESGPGLVAPSQSLSITCTVSGFSLTSYGVHWVRQPAGKGLEWLGVIWAGGITNYNSALMSRLSIIQDNSKSQVFLKMNSLQTDDTAMYYCARDWERDSSGPFVYWGQGTLVTVSA

SEQ ID NO: 65 - protein, 120 aa, Artificial Sequence
  Full-Length sequence of the Heavy Chain of H5S19-20CH as described in Table 3.
QVQLKESGPVLVAPSQSLSITCTVSGFSLTSYGVHWVRQPPGKGLEWLGVIWAGGITNYNSALMSRLSISKDNSKSQVFLKMNSLQTDDTAMYYCARDWERDSSGPFVYWGQGTLVTVSA

SEQ ID NO: 66 - protein, 120 aa, Artificial Sequence
  Full-Length sequence of the Heavy Chain of H5S19-21AH as described in Table 3.
QVQLKESGPGLVAPSQSLSITCTVSGFSLTSYGVHWVRQPPGKGLEWLGVIWAGGITNYNSALMSRLSISTDNSRSQVFLKMNSLQTDDTAMYYCARDWERDSSGPFPYWGQGTLVTVSA

SEQ ID NO: 67 - protein, 120 aa, Artificial Sequence
  Full-Length sequence of the Heavy Chain of H5S19-22AH as described in Table 3.
QVQLKESGPGLVAPSQSLSITCTVSGFSLTNYGVHWLRQPPGKGLEWLGVIWAGGITNYNSALMSRLSISNDNSRSQVFLKMNSLQTDDTAMYYCARDWERDSSGPFAYWGQGTLVTVSA

SEQ ID NO: 68 - protein, 120 aa, Artificial Sequence
  Full-Length sequence of the Heavy Chain of H5S19-26AH as described in Table 3.
QVQLKESGPGLVAPSQSLSITCTVSGFSLTTYGVYWVRQPPGKGLEWLGVIWAGGITNYNSALMSRLSISKDNSKSQVFLKMNSLQTGDTAMYYCARDWERDSSGPFAYWGQGTLVTVSA

SEQ ID NO: 69 - protein, 120 aa, Artificial Sequence
  Full-Length sequence of the Heavy Chain of H5S19-27AH as described in Table 3.
QVQLKESGPGLVAPSQSLSITCTVSGFSLTSYGVHWVRQPPGKGLEWLGVIWAGGITSYNSALMSRLSISSDNSRSQVFLKMNSLQTDDTAMYYCARDWERDSSGPFPYWGQGTLVTVSA

SEQ ID NO: 70 - protein, 120 aa, Artificial Sequence
  Full-Length sequence of the Heavy Chain of ITI_144H as described in Table 3.
QVQLKESGPGLVAPSQNLSITCTVSGFSLTTYGVHWVRQPPGKGLEWLGVIWAGGITNYNSALMSRLSISKDNFKSQVFLKMNSLQTDDTAIYYCARDWERDSSGPFPYWGQGTLVTVSA

SEQ ID NO: 71 - protein, 120 aa, Artificial Sequence
  Full-Length sequence of the Heavy Chain of ITI_145H as described in Table 3.
QVQLKESGPGLVAPSQNLSITCTVSGFSLSTYGVHWVRQPPGKGLEWLGVIWAGGITNYNSALMSRLSISKDNFKSQVFLKMNSLQTDDTAIYYCARDWERDSSGPFPYWGQGTLVTVSA

SEQ ID NO: 72 - protein, 120 aa, Artificial Sequence
  Full-Length sequence of the Heavy Chain of ITI_146H as described in Table 3.
QVQLKESGPGLVAPSQSLSITCTVSGFSLTTYGVHWVRQPPGKGLEWLGVIWAGGITNYNSALMSRLNISKDNSKSQVFLKMNSLQSDDTAMYYCARDWERDSSGPFAYWGQGTLVTVSA

SEQ ID NO: 73 - protein, 120 aa, Artificial Sequence
  Full-Length sequence of the Heavy Chain of ITI_162H as described in Table 3.
QVQLKESGPGLVAPSQSLSITCTVSGFSLTSYGVHWVRQPPGKGLEWLGVIWAGGITNYNSALMSRLSINIDNSKSQVFLKMNSLQTDDTAMYYCARDWERDSSGPFPYWGQGTLVTVSA

SEQ ID NO: 74 - protein, 120 aa, Artificial Sequence
  Full-Length sequence of the Heavy Chain of ITI_164H as described in Table 3.
GAAEGVRRPGLVAPSQSLSITCTVSGFSLTTYGVHWVRQPPGKGLEWLGVIWAGGITNYNSALMSRLNINKDNSKSQVFLKMNSLQTGDTAMYYCARDWERDSSGPFAYWGQGTLVTVSA

SEQ ID NO: 75 - protein, 120 aa, Artificial Sequence
  Full-Length sequence of the Heavy Chain of ITI_165H as described in Table 3.
QVQLKESGPGLVAPSQSLSITCTVSGFSLTSYGVHWVRQPPGKGLEWLGVIWAGGITNYNSALMSRLSITKDNSKSQVFLKMNSLQTDDTAMYYCARDWERDSSGPFAYWGQGTLVTVSA

SEQ ID NO: 76 - protein, 120 aa, Artificial Sequence
  Full-Length sequence of the Heavy Chain of ITI_168H as described in Table 3.
QVQLKESGPGLVAPSQSLSITCTVSGFSLTTYGVHWVRQPPGKGLEWLGVIWAGGITNYNSALMSRLNINKDNSKSQVFLKMNSLQTGDTAMYYCARDWERDSSGPFAYWGQGTLVTVSA

SEQ ID NO: 77 - protein, 117 aa, Artificial Sequence
  Full-Length sequence of the Heavy Chain of H5S14-15AH as described in Table 3.
QVQLKQSGPGLVQPSQSLSITCTVSGFSLTSYGVHWVRQSPGKGLEWLGVIWSGGSTDYNAAFICRLSISKDSSKSQVFFKMNSLQADDTAMYYCARNLGGSWVDYWGQGTSVTVSS

SEQ ID NO: 78 - protein, 116 aa, Artificial Sequence
  Full-Length sequence of the Heavy Chain of H5S14-17AH as described in Table 3.
QVQLQQSGAELVRPGTSVKMSCKAAGYTFTNYWIGWVKQRPGHGLEWIGDIYPGGGYTNYNEKFKGKATLTADTSSSTAYMQLSSLTSEDSAIYYCARNGNSLDYWGQGTTLTVSS

SEQ ID NO: 79 - protein, 118 aa, Artificial Sequence
  Full-Length sequence of the Heavy Chain of H5S14-25AH as described in Table 3.
QVQLQQSGAELVKPGASVKMSCKAFGYTFTTYPIEWMKQNHGKSLEWIGNFHPYNDDTKYNEKFKGKAKLTVEKSSSTVYLELSRLTSDDSAVYYCARRLYGGAMDYWGQGTSVTVSS

SEQ ID NO: 80 - protein, 115 aa, Artificial Sequence
  Full-Length sequence of the Heavy Chain of H5S14-6AH as described in Table 3.
EVKLVESGGGLVQPGGSLRLSCATSGFTFTDYYMSWVRQTPGKALEWLGFIRNQANAYTTEYSVSVKGRFTISRDNSQSILYLQMNTLRVEDSATYYCARVPDYWGQGTTLTVSS

SEQ ID NO: 81 - protein, 117 aa, Artificial Sequence
  Full-Length sequence of the Heavy Chain of H5S15-12AH as described in Table 3.
EVQLQQSGAELVKPGASVKLSCTASGFNIKDTYMHWVKQRPEQGLEWIGRIDPANGNTKFDPKFQGKATITADTSSNTAYLQLSSLTSEDTAVYYCASRGGSSFDYWGQGTTLTVSS

SEQ ID NO: 82 - protein, 118 aa, Artificial Sequence
  Full-Length sequence of the Heavy Chain of H5S15-30AH as described in Table 3.
QVQLQQPGAELVKPGAPVKLSCKASGYTFTSYWMNWVKQRPGRGLEWIGRIDPSDSETHYNQKFKDKATLTVDKSSSTAYIQLSSLTSEDSAVYYCAREYYGNHFDYWGQGTTLTVSS

SEQ ID NO: 83 - protein, 113 aa, Artificial Sequence
  Full-Length sequence of the Heavy Chain of H5S15-38AH as described in Table 3.
EVQLQQSGPELVKPGASVKMSCKASGYTFTSYVMHWVKQKPGQGLEWIGYINPYNDGTKYNEKFKGKATLTSDKSSSTAYMELSSLTSEDSAVYYCARMYDYWGQGTTLTVSS

SEQ ID NO: 84 - protein, 116 aa, Artificial Sequence
  Full-Length sequence of the Heavy Chain of H5S19-11AH as described in Table 3.
DVQLQESGPGLVNPSQSLSLTCTVTGYSITSDYAWNWIRQFPGNKLEWMGYISYSGNTGYNPSLKSRISITRDTSKNQFFLQLNSVTSEDTATYYCARWGLRIDYWGQGTTLTVSS

SEQ ID NO: 85 - protein, 118 aa, Artificial Sequence
  Full-Length sequence of the Heavy Chain of H5S19-25AH as described in Table 3.
QVQLQQSGAELMKPGASVKISCKATGYTFSSYWIEWVKQRPGHGLEWIGEILPGSGSTNYNEKFKGKATFTADTSSNTAYMQLSSLTSEDSAVYYCARYPRWGKIDYWGQGTTLTVSS

SEQ ID NO: 86 - protein, 116 aa, Artificial Sequence
  Full-Length sequence of the Heavy Chain of H5S19-6AH as described in Table 3.
EVQLVESGGGLVKPGGSLKLSCAASGFTFNIYTMSWVRQSPEMRLEWVAEISSGGSHTYYPDTVTGRFTISRDNAKNTLYLEMSSLRSEDTAIYYCARGGSLFDYWGQGTTLTVSS

SEQ ID NO: 87 - protein, 117 aa, Artificial Sequence
  Full-Length sequence of the Heavy Chain of H5S20-15AH as described in Table 3.
EVQLQQSGAELVKPGASVKLSCTASGFNIKDTYMHWVKQRPEQGLEWIGRIDPANGNTKYDPKFQGKATITADTSSNTAYLQLSSLTSEDTAVYYCATSGGSSYDYWGQGTTLTVSS

SEQ ID NO: 88 - protein, 117 aa, Artificial Sequence
  Full-Length sequence of the Heavy Chain of H5S20-25AH as described in Table 3.
EVQLQQSGAELVKPGASVKLSCTASGFNIKDTYMHWVKQRPEQGLEWIGRIDPANGNTKYDPKFQGKATITADTSSNTAYLQLSSLTSEDTAVYYCARSGGSSYDYWGQGTTLTVSS

SEQ ID NO: 89 - protein, 117 aa, Artificial Sequence
  Full-Length sequence of the Heavy Chain of H5S20-34AH as described in Table 3.
EVQLQQSGAELVKPGASVKLSCTASGFNIKDTYMHWVKQRPEQGLEWIGRIDPANGNTKYDPKFQGKATITADTSSNTAYLQLSSLTSEDTAVYYCASSGGSSFDYWGQGTTLTVSS

SEQ ID NO: 90 - protein, 117 aa, Artificial Sequence
  Full-Length sequence of the Heavy Chain of H5S20-42AH as described in Table 3.
EVQLQQSGAELVKPGASVKLSCTASGFNIKDTYMHWVKQRPEQGLEWIGRIDPANGNTKYDPKFQGKATITADTSSNTAYLQLSSLTSEDTAVYYCAGSGGSSYDYWGQGTTLTVSS

SEQ ID NO: 91 - protein, 117 aa, Artificial Sequence
  Full-Length sequence of the Heavy Chain of H5S20-8AH as described in Table 3.
EVQLQQSGAELVKPGASVKLSCTASGFNIKDTYMHWVKQRPEQGLEWIGRIDPANGNTKYDPKFQGKATITADTSSNTAYLQLSSLTSEDTAVYYCAISGGSSYDYWGQGTTLTVSS

SEQ ID NO: 92 - protein, 118 aa, Artificial Sequence
  Full-Length sequence of the Heavy Chain of ITI_021H as described in Table 3.
DVQLQESGPGLVKPSQSLSLTCTVTGYSITSDYAWNWVRQFPGNKLEWVGYISYSGSTSYNPSLKSRISITRDTSKNQFFLQLNSVTTEDTATYYCARCYYGGRWDYWGQGTTLTVSS

SEQ ID NO: 93 - protein, 116 aa, Artificial Sequence
  Full-Length sequence of the Heavy Chain of ITI_173H as described in Table 3.
DVQLQESGPGLVNPSQSLSLTCTVTGYSITSDYAWNWIRQFPGNKLEWMGYINYSGNTGYNPSLKSRISITRDTSKNQFFLQLNSVTSEDTATYYCARWGLRIDYWGQGTTLTVSS

SEQ ID NO: 94 - protein, 117 aa, Artificial Sequence
  Full-Length sequence of the Heavy Chain of ITI_200H as described in Table 3.
EVQLQQSGAELVKPGASVKLSCTASGFNIKDTYIHWVKQRPEQGLEWIGRIDPANGNIKYDPKFQGKATIMADTSSNTAYLQLSSLTSEDTAVYYCAQGGGGAMDYWGQGTSVTVSS

SEQ ID NO: 95 - protein, 120 aa, Artificial Sequence
  Full-Length sequence of the Heavy Chain of H5S15-11AH as described in Table 3.
EVQLQQSGADLVKPGASVKLSCTASGFNIKDTYMHWVKQRPEQGLEWIGRIAPANGRTKYDPKFQGKATITADTSSNTAYLQLSSLTSEDTAVYYCANYYASSYDWFAYWGQGTLVTVSA

SEQ ID NO: 96 - protein, 120 aa, Artificial Sequence
  Full-Length sequence of the Heavy Chain of H5S15-17AH as described in Table 3.
EVQLQQSGAELVKPGASVKLSCTASGFNIKDTYMHWVKQRPEQGLEWIGRIAPANGKTKFDPKFQGKATITADTSSNTAYLQLSSLTSEDTAVYYCANYYGRSNDWFVYWGQGTLVTVSA

SEQ ID NO: 97 - protein, 120 aa, Artificial Sequence
  Full-Length sequence of the Heavy Chain of H5S15-1AH as described in Table 3.
EVQLQQSGAELVKPGASVKLSCTASGFNIKDTYMHWVKQRPEQGLAWIGRIAPANGYTKYDPKFQGKATITTDTSSNTAYLHLSRLTSEDTAVYYCANYFGNTYDWFAFWGQGTLVTVSA

SEQ ID NO: 98 - protein, 120 aa, Artificial Sequence
  Full-Length sequence of the Heavy Chain of H5S15-24AH as described in Table 3.
EVQLQQSGAELVKPGASVKLSCTASGFNIKDTYMHWVKQRPEQGLEWIGRIAPANGRTKYDPKFQGKATITADTSSNTAYLQLSSLTSEDTAVYYCANYYASSYDWFVYWGQGTLVTVSA

SEQ ID NO: 99 - protein, 118 aa, Artificial Sequence
  Full-Length sequence of the Heavy Chain of H5S15-36AH as described in Table 3.
EVQLQQSGAELVKPGASVKLSCTASGFNIKDTYMHWVKQRPEQGLEWIGRIDPANGNTKYDPKFQGKATITADTSSNTAYLQLSSLTSEDTAVYYCARPYGNYGFAYWGQGTLVTVSA

SEQ ID NO: 100 - protein, 118 aa, Artificial Sequence
  Full-Length sequence of the Heavy Chain of H5S15-37AH as described in Table 3.
QVQLQQPGAELVKPGAPVKLSCKASGYTFSTYWMNWVKQRPGRGLEWIGRIDPSDSETHYNQKFKDKATLTVDKSSSTAYIQLSSLTSEDSAVYYCAIYYSNPVFDYWGQGTTLTVSS

SEQ ID NO: 101 - protein, 120 aa, Artificial Sequence
  Full-Length sequence of the Heavy Chain of H5S15-3AH as described in Table 3.
EVQLQQSGAELVKPGASVKLSCTASGFNIKDTYMHWVKQRPEQGLAWIGRIAPANGYTKYDPKFQGKATITTDTSSNTAYLQLSSLTSEDTAVYYCVTYFGNTYDWFAYWGQGTLVTVSA

SEQ ID NO: 102 - protein, 118 aa, Artificial Sequence
  Full-Length sequence of the Heavy Chain of H5S20-10AH as described in Table 3.
EVQLQQSGAELVKPGASVKLSCTASGFNIKDTYMHWVNQRPEQGLEWIGRIDPANGNTKYAPKFQGKATITADTSSNTVYLQLSSLTSEDTAVYYCAGYGNSPWFAYWGQGTLVTVSA

SEQ ID NO: 103 - protein, 118 aa, Artificial Sequence
  Full-Length sequence of the Heavy Chain of H5S20-10BH as described in Table 3.
EVQLQQSGAELVKPGASVKLSCTASGFNIKDTYMHWVNQRPEQGLEWIGRIDPANGNTKYAPKFQGKATITADTSSNTAYLQLSSLTSEDTAVYYCAGYGNSPWFAYWGQGTLVTVSA

SEQ ID NO: 104 - protein, 118 aa, Artificial Sequence
  Full-Length sequence of the Heavy Chain of H5S20-17AH as described in Table 3.
EVQLQQSGAELVKPGASVKLSCTASGFNIKDTYMHWVNQRPEQGLEWIGRIDPANGKTKYAPKFQDKATITADTSSNTAYLQLSSLTSEDTAVYYCAGYGNSPWFAYWGQGTLVTVSA

SEQ ID NO: 105 - protein, 119 aa, Artificial Sequence
  Full-Length sequence of the Heavy Chain of H5S20-49AH as described in Table 3.
EVQLQQSGAELVKPGASVKLSCTASGFNIKDTYVHWVKERPEQGLEWIGRIDPANDNTKYAPKFQVKATITADTSSNTAYLQLSSLTSEDNAVYYCAPYGNYPAWFAYWGQGTLVTVSA

SEQ ID NO: 106 - protein, 118 aa, Artificial Sequence
  Full-Length sequence of the Heavy Chain of H5S20-52AH as described in Table 3.
EVQLQQSGAELVKPGASVKLSCTASGFNIKDTYIHWLNQRPEQGLEWIGRIDPANGKTKFAPKFQDKATITADTSSNTAYLQLSSLTSEDTAVYYCAGYGNSPWFAYWGQGTLVTVSA

SEQ ID NO: 107 - protein, 118 aa, Artificial Sequence
  Full-Length sequence of the Heavy Chain of H5S20-58AH as described in Table 3.
EVQLQQSGAELVKPGASVMLSCTASGFYIKDTYMHWVNQRPEQGLEWIGRIDPANGKTKYAPKFQDKATITADSSSNTAYLQLSSLTSEDTAVYYCAGYGNSPWFAYWGQGTLVTVSA

SEQ ID NO: 108 - protein, 118 aa, Artificial Sequence
  Full-Length sequence of the Heavy Chain of H5S20-9AH as described in Table 3.
EVQLQQSGADLVKPGASVKLSCTASGFNIRDTYMHWVNQRPEQGLEWIGRIDPANGNTKYAPKFQGRATITADTSSNTAYLHLSSLTSEDTAVYYCAGYGNSPWFAYWGQGTLVTVSA

SEQ ID NO: 109 - protein, 118 aa, Artificial Sequence
  Full-Length sequence of the Heavy Chain of ITI_091H as described in Table 3.
EVQLQQSGAELLKPGASVRLSCTASGFNFKDTYMHWVNQRPEQGLEWIGRIDPANGKTKYAPKFQGKATITADTSSNTAYLQLSSLTSEDAAVFYCAAYGNSPWFAYWGQGTLVTVSA

SEQ ID NO: 110 - protein, 120 aa, Artificial Sequence
  Full-Length sequence of the Heavy Chain of ITI_122H as described in Table 3.
QVQLQQSGAELVRPGTSVKVSCKASGYAFTNYLIEWVKQRPGQGLEWIGVINPGSGGTNYNEKFRGKATLTADKSSSTAYMQLSSLTSDDSAVYFCARRGHNYGPWFAYWGQGTLVTVSA

SEQ ID NO: 111 - protein, 122 aa, Artificial Sequence
  Full-Length sequence of the Heavy Chain of H5S14-10AH as described in Table 3.
QVTLKESGPGILQPSQTLSLTCSFSGFSLSTSGMGVSWIRQPSGKGLEWLAHIYWDDDKRYNPSLKSRLTISKDTSRNQVFLKITSVDTADTATYYCARSMYGNYNYAMDYWGQGTSVTVSS

SEQ ID NO: 112 - protein, 118 aa, Artificial Sequence
  Full-Length sequence of the Heavy Chain of H5S14-16AH as described in Table 3.
EVQLVESGGGLVKPGGSLKLSCAASGFTFSDYYMYWVRQTPEKRLEWVATISDGGSYTYYPDSVKGRFTISRDNAKNNLYLQMSSLKSEDTAMYYCARDGNYYAMDYWGQGTSVTVSS

SEQ ID NO: 113 - protein, 122 aa, Artificial Sequence
  Full-Length sequence of the Heavy Chain of H5S14-20AH as described in Table 3.
QVQLQQPGAELVRPGASVKLSCKASGYTFTNYWINWVKQRPGQGLEWIGNIYPSDSYTNYNQKFKDKATLTVDKSSSTAYMQLSSPTSEDSAVYYCTRGHYGNYDPYAMDYWGQGTSVTVSS

SEQ ID NO: 114 - protein, 125 aa, Artificial Sequence
  Full-Length sequence of the Heavy Chain of H5S14-22AH as described in Table 3.
EVQLQQSGPELVKPGASVKMSCKASGYTFTSYVMHWVKQKPGQGLEWIGYINPYNDGTKYNEKFKGKATLTSDKSSSTAYMELSSLTSEDSAVYYCARGIITTVIEPILYAMDYWGQGTSVTVSS

SEQ ID NO: 115 - protein, 121 aa, Artificial Sequence
  Full-Length sequence of the Heavy Chain of H5S14-26AH as described in Table 3.
QVQLQQSGAELVRPGTSVKVSCKASGYAFTNYLIEWVKQRPGQGLEWIGVINPGSGGTKYNEKFKGKATLTADKSSSTAYMQLSSLTSDDSAVYFCARDYGSSYGYAMDYWGQGTSVTVSS

SEQ ID NO: 116 - protein, 117 aa, Artificial Sequence
  Full-Length sequence of the Heavy Chain of H5S14-28AH as described in Table 3.
QVQLQQSGAELVRPGTSVKISCKASGYTFTNYWLSWVKQRPGHGLEWIGDIYPGGGYTNYNEKFKGKATLTADTSSSTAYMQLSSLTSEDSAVCFCARRVDYAMDYWGQGTSVTVSS

SEQ ID NO: 117 - protein, 125 aa, Artificial Sequence
  Full-Length sequence of the Heavy Chain of H5S14-29AH as described in Table 3.
EVQLQQSGPELVKPGASVKMSCKASGYTFTSYVMHWVKQKPGQGLEWIGYINPYNDGTKYNEKFKGKATLTSDKSSSTAYMELSSLTSEDSAVYYCARGIITTVVEPILYAMDYWGQGTSVTVSS

SEQ ID NO: 118 - protein, 119 aa, Artificial Sequence
  Full-Length sequence of the Heavy Chain of H5S15-33AH as described in Table 3.
QVQLKQSGPGLVQPSQSLSITCTVSGFSLTTYGVHWVRQSPGKGLEWLGVIWSGGNTDYNPAFISRLSISKDNSKSQVFFKMNTLQASDTAIYYCARRGYNKGYAMDYWGQGTSFTVSS

SEQ ID NO: 119 - protein, 118 aa, Artificial Sequence
  Full-Length sequence of the Heavy Chain of H5S15-40AH as described in Table 3.
EVQLVESGGGLVKPGGSLKLSCAASGFAFSSYDMSWVRQTPEKRLEWVAYISSGGGSTYYPDTVKGRFTISRDNAKNTLYLQMSSLKSEDTAMYYCARLLRYYAMDYWGQGTSVTVSS

SEQ ID NO: 120 - protein, 121 aa, Artificial Sequence
  Full-Length sequence of the Heavy Chain of H5S19-9AH as described in Table 3.
QVQLKQSGPGLVQPSQSLSITCTVSGFSLTTYGVHWVRQSPGKGLEWLGVIWSGGSTDYNAAFISRLSISKDNSKSQVFFKMNSLQANDTAIYYCARRGYGSPYYYAMDYWGQGTSVTVSS

SEQ ID NO: 121 - protein, 120 aa, Artificial Sequence
  Full-Length sequence of the Heavy Chain of H5S20-21AH as described in Table 3.
QVQLQQPGAELVKPGASVMMSCKASGYTFTNYWMHWVRQRPGQGLEWIGVIDPSDSFTNYNQSFRGKATLTVDTSSSTAYMRLSSLTSEDSAVYFCSRGERRGIYAMDYWGQGSSVTVSS

SEQ ID NO: 122 - protein, 119 aa, Artificial Sequence
  Full-Length sequence of the Heavy Chain of ITI_130H as described in Table 3.
QVQLKQSGPGLVQPSQSLSITCTVSGFSLTTYGVHWVRQSPGKGLEWLGVIWSGGSTDYNAAFISRLSISKDNSKSQVFFKMNSLQANDTAIYYCARRGYGKGYAMDYWGQGTSVTVSS

SEQ ID NO: 123 - protein, 119 aa, Artificial Sequence
  Full-Length sequence of the Heavy Chain of ITI_131H as described in Table 3.
QVQLKQSGPGLVQPSQSLSITCTVSGFSLTTYGVHWVRQSPGKGLEWLGVIWSGGSTDYNAPFISRLSISKDNSKSQVFFKMNSLQANDTAIYYCARRGYNKGYAMDYWGQGTSVTVSS

SEQ ID NO: 124 - protein, 121 aa, Artificial Sequence
  Full-Length sequence of the Heavy Chain of ITI_180H as described in Table 3.
QVQLKQSGPGLVQPSQSLSITCTVSGFSLTTYGIHWVRQSPGKGLEWLGVIWSGGSTDYNAAFISRLSITKDKSKSQVFFKMNSLQANDTAIYYCARRGYGSPYYYAMDYWGQGTSVTVSS

SEQ ID NO: 125 - protein, 117 aa, Artificial Sequence
  Full-Length sequence of the Heavy Chain of H5S15-15AH as described in Table 3.
QIQLVQSGPEVKKPGETVKISCKASGYTLTNYGMNWVKQAPGKGLKWVGWINTYTGEPTYADDFKGRFAFSLETSASTAYLQINNLKNEDMATYFCARSFYGSEAYWGQGTLVTVSA

SEQ ID NO: 126 - protein, 117 aa, Artificial Sequence
  Full-Length sequence of the Heavy Chain of H5S15-7AH as described in Table 3.
QIQLVQSGPELKKPGETVKISCKASGYTFTNYGMNWVKQAPGKGLKWVGWINTYTGEPTYAEDFKGRFAFSLETSASTAYLQINNLKNEDMATYFCARSFYGSEAYWGQGTLVTVSA

SEQ ID NO: 127 - protein, 117 aa, Artificial Sequence
  Full-Length sequence of the Heavy Chain of H5S15-7BH as described in Table 3.
QIQLVQSGPELKKPGETVKISCKASGYTFTNYGMNWVKQAPGKGLKWVGWINTYTGEPTYADDFKGRFAFSLETSASTAYLQINNLKNEDMATYFCARSFYGSEAYWGQGTLVTVSA

SEQ ID NO: 128 - protein, 117 aa, Artificial Sequence
  Full-Length sequence of the Heavy Chain of H5S19-13AH as described in Table 3.
QIQLVQSGPELKKPGETVKISCKASGYTFTNFGVNWVKQAPGKGLKWMGWINTYTGEPTYADDFKGRFAFSLETSASTAYLRINNLKNEDTATYFCARSYYANYAYWGQGTTLTVSS

SEQ ID NO: 129 - protein, 117 aa, Artificial Sequence
  Full-Length sequence of the Heavy Chain of H5S19-3AH as described in Table 3.
QIQLVQSGPELKKPGETVKISCKASGYTFTNFGVNWVKQAPGKGLKWMGWINTYTGEPTYADDFKGRFAFSLETSASTAYLRINNLKNEDSATYFCARSFYKNYAFWGQGTILTVSS

SEQ ID NO: 130 - protein, 117 aa, Artificial Sequence
  Full-Length sequence of the Heavy Chain of H5S19-3BH as described in Table 3.
QIQLVQSGPELKKPGETVKISCKASGYTFTNFGVNWVKQAPGKGLKWMGWINTYTGEPTYADDFKGRFAFSLETSASTAYLRINNLKNEDTATYFCARSFYKNYAFWGQGTILTVSS

SEQ ID NO: 131 - protein, 117 aa, Artificial Sequence
  Full-Length sequence of the Heavy Chain of H5S19-3CH as described in Table 3.
QIQLVQSGPELKKPGETVKISCKASGYTFTNFGVNWVKQAPGKDLKWMGWINTYTGEPTYADDFKGRFAFSLETSASTAYLRINNLKNEDTATYFCARSFYKNYAFWGQGTILTVSS

SEQ ID NO: 132 - protein, 117 aa, Artificial Sequence
  Full-Length sequence of the Heavy Chain of H5S19-8AH as described in Table 3.
QIQLVQSGPELKKPGETVKISCKASGYTFTNFGVNWVKQAPGKGLKWMGWINTYTGEPTYADDFKGRFAFSLETSASTAYLRINNLKNEDTASYFCARSYYANNAYWGQGTTLTVSS

SEQ ID NO: 133 - protein, 117 aa, Artificial Sequence
  Full-Length sequence of the Heavy Chain of ITI_032H as described in Table 3.
QIQLVQSGPELKKPGETVKISCKASGYTFTNFGVNWVKQAPGKGLKWMGWINTYTGEPTYADDFKGRFAFSLETSASTAYLRINNLKNEDTATYFCARSFYKNYAFWGQSTILTVSS

SEQ ID NO: 134 - protein, 117 aa, Artificial Sequence
  Full-Length sequence of the Heavy Chain of ITI_035H as described in Table 3.
QIQLVQSGPELKKPGETVKISCKASGYTFTNFGVNWVKQAPGKGLKWMGWINTYTGEPTYADDFKGRFAFSLETSASTAYLRINNLKNEDTATYFCARSYYGNYAYWGQGTTLTVSS

SEQ ID NO: 135 - protein, 117 aa, Artificial Sequence
  Full-Length sequence of the Heavy Chain of ITI_082H as described in Table 3.
QIQLVQSGPELKKPGETVKISCKASGYTFTNYGMNWVKQAPGKGLKWMGWINTYTGEPTYADDFKGRFAFSLETSASTAYLQINNLKNEDTATYFCARSFTTATCYWGQGTTLTVSS

SEQ ID NO: 136 - protein, 117 aa, Artificial Sequence
  Full-Length sequence of the Heavy Chain of ITI_083H as described in Table 3.
QIQLVQSGPELKKPGETVKISCKASGYTFTNYGMNWVKQAPGKGLKWMGWINTYTGEPTYDDDFKGRFAFSLETSASTAYLQINNLKNEDTATYFCARSFTTATCYWGQGTTLTVSS

SEQ ID NO: 137 - protein, 123 aa, Artificial Sequence
  Full-Length sequence of the Heavy Chain of H5S14-18AH as described in Table 3.
EVQLVETGGGLVQPKGSLKLSCAASGFTFNTNAMNWVRQAPGKGLEWVARIRSKSNNYATYYADSVKDRFTISRDDSQSMLYLQMNNLKTEDTAMYYCVREGGYGNYPYFDYWGQGTTLTVSS

SEQ ID NO: 138 - protein, 112 aa, Artificial Sequence
  Full-Length sequence of the Heavy Chain of H5S14-23AH as described in Table 3.
LVKTGASVKISCKASGYSFTGYYMHWVKQSHGKSLEWIGYISCYNGATSYNQKFKGKATFTVDTSSSTAYMQFNSLTSEDSAVYYCARTYYYGSSYGAMDYWGQGTSVTVSS

SEQ ID NO: 139 - protein, 121 aa, Artificial Sequence
  Full-Length sequence of the Heavy Chain of H5S14-30AH as described in Table 3.
EVQLVESGGDLVKPGGSLKLSCAASGFTFSSYGMSWVRQTPDKRLEWVATISSGGSYTYYPDSVKGRFTISRDNAKNTLYLQMSSLKSEDTAMYYCARQGGHGNYGAMDYWGQGTSVTVSS

SEQ ID NO: 140 - protein, 123 aa, Artificial Sequence
  Full-Length sequence of the Heavy Chain of H5S15-14AH as described in Table 3.
EVQLQQSGPELVKPGASVKMSCKASGYTFTSYVMHWVKQKPGQGLEWIGYINPYNDDTNCNEKFKGKATLTSDKSSSTAYMELSRLTSEDSAVYYCAKARGYGSTFYYSMDYWGQGTSVTVSS

SEQ ID NO: 141 - protein, 123 aa, Artificial Sequence
  Full-Length sequence of the Heavy Chain of H5S15-25AH as described in Table 3.
EVQLQQSGPELVKPGASVKMSCKASGYKFNSYVMHWVKQKPGQGPEWIGYINPYNDDTNCNEKFKGKATLTSDKSSSTAYMELSSLTSEDSAVYYCAKARGYGGNFYYSMDYWGQGTSVTVSS

SEQ ID NO: 142 - protein, 123 aa, Artificial Sequence
  Full-Length sequence of the Heavy Chain of H5S15-5AH as described in Table 3.
EVQLQQSGPELVKPGASVKMSCKASGYTFTSYVMHWVKQKPGQGLEWIGYINPYNDDTNCNEKFKGKATLTSDKSSSTAYMDLSSLTSEDSAVYYCAKARGYGGSFYYSMDYWGQGTSVTVSS

SEQ ID NO: 143 - protein, 123 aa, Artificial Sequence
  Full-Length sequence of the Heavy Chain of H5S20-44AH as described in Table 3.
EVKLVESGGGLVQPGGSLKLSCAASGFTFSSYTMSWVRQTPEKRLEWVAYISNGGGSTYYPDTVKGRFTISRDNAKNTLYLQMSSLKSEDTAMYYCARHRGYGSSYNYAMDYWGQGTSVTVSS

SEQ ID NO: 144 - protein, 122 aa, Artificial Sequence
  Full-Length sequence of the Heavy Chain of H5S20-46AH as described in Table 3.
EVKLVESGGGLVQPGGSLKLSCAASGFTFSSYTMSWVRQTPEKRLEWVAYISNGGGSTYYPDTVKGRFTISRDNAKNTLYLQMSSLKSEDTAMYYCARHRGYGNYVYAMDYWGQGTSVTVSS

SEQ ID NO: 145 - protein, 121 aa, Artificial Sequence
  Full-Length sequence of the Heavy Chain of H5S20-51AH as described in Table 3.
QVQLKQSGPGLVQPSQSLSITCTVSGFSLTSYGVHWVRQSPGKGLEWLGVIWRGGSTDYNAAFMSRLSITKDNSKSQVFFKMNSLQADDTAIYYCAKNRGYGEGYYAMDYWGQGTSVTVSS

SEQ ID NO: 146 - protein, 121 aa, Artificial Sequence
  Full-Length sequence of the Heavy Chain of H5S20-53AH as described in Table 3.
EVQLVESGGGLVKPGGSLKLSCAASGFTFSSYAMSWVRQSPEKRLEWVAEISSGGSYTYYPDTVTGRFTISRDNAKNTLYLEMSSLRSEDTAMYYCAREGLRRDYYALDYWGQGTSVTVSS

SEQ ID NO: 147 - protein, 122 aa, Artificial Sequence
  Full-Length sequence of the Heavy Chain of H5S20-55AH as described in Table 3.
EVKLVESGGGLVQPGGSLKLSCAASGFTFSSYTMSWVRQTPEKRLEWVADISNGGGSTYYPDTVKGRFTISRDNAKNTLYLQMSSLKSEDTAMYYCARHRGYGNYVYAMDYWGQGTSVTVSS

SEQ ID NO: 148 - protein, 121 aa, Artificial Sequence
  Full-Length sequence of the Heavy Chain of H5S20-59AH as described in Table 3.
EVKLVESGGGLVKPGGSLKLSCAASGFTFSSYAMSWVRQTPEKRLEWVASISSGSSTYYPDSVKGRFTISRDNARNILYLQMSSLRSEDTAMYYCAKGRGYGNYLYAMDYWGQGTSVTVSS

SEQ ID NO: 149 - protein, 119 aa, Artificial Sequence
  Full-Length sequence of the Heavy Chain of H5S15-19AH as described in Table 3.
QVQLKESGPGLVAPSQSLSITCTVSGFSLTGYGVNWVRQPPGKGLEWLGMIWGDGGTDYNSALKSRLSISKDNSKSQVFLKMNSLQTDDTARYYCARDNYHTVVNGDYWGQGTSVTVSS

SEQ ID NO: 150 - protein, 119 aa, Artificial Sequence
  Full-Length sequence of the Heavy Chain of H5S15-32AH as described in Table 3.
QVQLKESGPGLVAPSQSLSITCTVSGFSLTGYGVNWVRQSPGKGLEWLGMIWGDGSTDYNSALKSRLSISKDNSKSQIFLKMNSVQTEDTARYYCARDSYRTMTNGDYWGQGTSVTVSS

SEQ ID NO: 151 - protein, 117 aa, Artificial Sequence
  Full-Length sequence of the Heavy Chain of H5S19-16AH as described in Table 3.
QIQLVQSGPELKKPGETVKISCKASGYTFTNFGVNWVKQAPGKGLKWMGWINTYTGEPTYADDFKGRFAFSLETSASTAYLQINNLKNEDTATYFCVRSYYGNSGYWGQGTTLTVSS

SEQ ID NO: 152 - protein, 117 aa, Artificial Sequence
  Full-Length sequence of the Heavy Chain of H5S19-19AH as described in Table 3.
QIQLVQSGPELKKPGETVKISCKASGYTFTNYGMNWVKQAPGKGLKWMGWINTYTGEPTYADDFKGRFAFSLETSASTAYLQINNLKNEDTATYFCVRSYYGNSGYWGQGTTLTVSS

SEQ ID NO: 153 - protein, 117 aa, Artificial Sequence
  Full-Length sequence of the Heavy Chain of H5S20-12AH as described in Table 3.
QIQLVQSGPELKKPGETVKISCKASGYTFTNFGMNWVRQAPGKGLKWMGWINTYTGEPTYADDFKGRFAFSLETSASTAYLQINNLKNDDMATYFCARSLYGNRDYWGQGTTLTVSS

SEQ ID NO: 154 - protein, 117 aa, Artificial Sequence
  Full-Length sequence of the Heavy Chain of H5S20-18AH as described in Table 3.
QIQLVQSGPELKKPGETVKISCKASGYIFTNYGMNWVRQAPGKGLKWMGWINTYTGEPTYADDFKGRFAFSLETSASTAYLQINNLKNEDMATYFCARSFYGNRDYWGQGTTLTVSS

SEQ ID NO: 155 - protein, 117 aa, Artificial Sequence
  Full-Length sequence of the Heavy Chain of ITI_100H as described in Table 3.
QIQLVQSGPELKKPGETVKISCKASGYTLTNFGMNWMKQAPGKGLKWMGWINTYTGEPTYAGDFKGRFAFSLETSASTAYLQINNLKNEDTATYFCVRSYYGNSGYWGQGTTLTVSS

SEQ ID NO: 156 - protein, 117 aa, Artificial Sequence
  Full-Length sequence of the Heavy Chain of ITI_101H as described in Table 3.
QIQLVQSGPELKKPGETVKISCKASGYTLTNFGMNWMKQAPGKDLKWMGWINTYTGEPTYAGDFKGRFAFSLETSASTAYLQINNLKNEDTATYFCVRSYYGNSGYWGQGTTLTVSS

SEQ ID NO: 157 - protein, 113 aa, Artificial Sequence
  Full-Length sequence of the Heavy Chain of H5S15-13AH as described in Table 3.
QVQLKQSGPGLVQPSQSLSITCTVSGFSLTSYGVHWVRQSPGKGLEWLGVIWRGGSTDYNAAFMSRLSITKDNSKSQVFFKMNSLQADDTAIYYCAKTGFAYWGQGTLVTVSA

SEQ ID NO: 158 - protein, 114 aa, Artificial Sequence
  Full-Length sequence of the Heavy Chain of H5S15-28AH as described in Table 3.
QVQLQQSGAELVKPGASVKMSCKAFGYTFTTYPIEWMKQNHGKSLEWIGNFHPYNDDTKYNEKFKGKAKLTVEKSSSTVYLELSRLTSDDSAVYYCARGGFAYWGQGTLVTVSA

SEQ ID NO: 159 - protein, 115 aa, Artificial Sequence
  Full-Length sequence of the Heavy Chain of H5S15-39AH as described in Table 3.
QIQLVQSGPELKKPGETVKISCKASGYTFTDYSMHWVKQAPGKGLKWMGWINTETGEPTYADDFKGRLAFSLETSASTAFLQINNLKNEDTATYFCANWAGFAYWGQGTLVTVSA

SEQ ID NO: 160 - protein, 117 aa, Artificial Sequence
  Full-Length sequence of the Heavy Chain of ITI_236H as described in Table 3.
EVQLQQSGPELVKPGASVKMSCKASGYTFTSYVMHWVKQKPGQGLEWIGYINPYNDGTKYNEKFKGKATLTSDKSSSTAYMELSSLTSEDSAVYYCARERTGPFAYWGQGTLVTVSA

SEQ ID NO: 161 - protein, 118 aa, Artificial Sequence
  Full-Length sequence of the Heavy Chain of ITI_238H as described in Table 3.
QVQLQQPGAELVMPGASVKMSCKASGYTFTDYWMHWVKQRPGQGLEWIGAIDTSDSYTSYNQKFKGKATLTVDESSSTAYMQLSSLTSEDSAVYYCARSARAAWFAYWGQGTLVTVSA

SEQ ID NO: 162 - protein, 119 aa, Artificial Sequence
  Full-Length sequence of the Heavy Chain of ITI_240H as described in Table 3.
QIQLVQSGPELKKPGETVKISCKASGYTFTNYGMNWVKQAPGKGLKWMGWINTYTGEPTYADDFKGRFAFSLETSASTAYLQINNLKNDDTATYFCARELLRSAWFAYWGQGTLVTVSA

SEQ ID NO: 163 - protein, 114 aa, Artificial Sequence
  Full-Length sequence of the Heavy Chain of H5S20-20AH as described in Table 3.
EVQLQQSGAELVRSGASVKLSCTASGFNIKDYYMHWVKQRPEQGLEWIGWIDPENGDTEYAPKFQGKATMTADTSSNAAYLQLSSLTSEDTAVYYCNSRTLGYWGQGTLVTVSA

SEQ ID NO: 164 - protein, 114 aa, Artificial Sequence
  Full-Length sequence of the Heavy Chain of H5S20-20BH as described in Table 3.
EVQLQQSGAELVRSGASVKLSCTASGFNIKDYYMHWVKQRPEQGLEWIGWIDPENGDTEYAPKFQGKATMTADTSSNTAYLQLSSLTSEDTAVYYCNSRTLGYWGQGTLVTVSA

SEQ ID NO: 165 - protein, 114 aa, Artificial Sequence
  Full-Length sequence of the Heavy Chain of H5S20-31AH as described in Table 3.
EVQLQQSGAELVRSGASVKLSCTTSGFNIKDYYMHWVKQRPEQGLEWIGWIDPENGDTEYAPKFQGKATMTADTSSNTAYLQLSSLTSEDTAVYYCNSRTLGYWGQGTLVTVSA

SEQ ID NO: 166 - protein, 114 aa, Artificial Sequence
  Full-Length sequence of the Heavy Chain of H5S20-31BH as described in Table 3.
EVQLQQSGAELVRSGASVKLSCTTSGFNIKDYYMHWVKQRPEQGLEWIGWIDPENGDTEYAPKFQGKATMTADTCSNTAYLQLSSLTSEDTAVYYCNSRTLGYWGQGTLVTVSA

SEQ ID NO: 167 - protein, 114 aa, Artificial Sequence
  Full-Length sequence of the Heavy Chain of H5S20-45AH as described in Table 3.
EVQLQQSGAELVRSGASVKLSCAASGFNIKDYYMHWVKQRPEQGLEWIGWIDPENGDTEFAPKFQGKATLTADTSSNTAYLQLSSLTSEDTAVYYCNTRTLGYWGQGTLVTVSA

SEQ ID NO: 168 - protein, 113 aa, Artificial Sequence
  Full-Length sequence of the Heavy Chain of H5S15-18AH as described in Table 3.
QVQLQQSGAELVRPGTSVKMSCKAAGYTFTNSWIGWVKQRPGHGLEWIGDIYPGGGYTNYYEKFKVKATLTADTSSSTAYMQLSSLTSEDSAIYYCASSGAYWGQGTTLTVSS

SEQ ID NO: 169 - protein, 113 aa, Artificial Sequence
  Full-Length sequence of the Heavy Chain of H5S15-26AH as described in Table 3.
QVQLQQSGAELVRPGTSVKMSCKAAGYTFTNSWMGWVKQRPGHGLEWIADIYPGGGYSNYNEKFKGKATLTADTSSSTAYMQLSSLTSEDSAIYYCASSGAYWGQGTTLTVSS

SEQ ID NO: 170 - protein, 113 aa, Artificial Sequence
  Full-Length sequence of the Heavy Chain of H5S15-8AH as described in Table 3.
QVQLQQSGAELVRPGTSVKMSCKAAGYTFTDSWIGWVKQRPGHGLEWIGDIYPGGGYTNYNEKFKGKATLTADTSSSTAYMQLSRLTSEDSAIYYCASSGAYWGQGTTLTVSS

SEQ ID NO: 171 - protein, 113 aa, Artificial Sequence
  Full-Length sequence of the Heavy Chain of H5S19-4AH as described in Table 3.
QVQLKESGPGLVAPSQSLSITCTVSGFSLTGYGVNWVRQPPGKGLEWLGMIWGDGNTDYNSALKSRLSISKDNSKSQVFLKMNSLQTDDTARYYCARSYGSYWGQGTLVTVSA

SEQ ID NO: 172 - protein, 113 aa, Artificial Sequence
  Full-Length sequence of the Heavy Chain of H5S20-56AH as described in Table 3.
EVKLVESGGGLVKPGGSLKLSCAASGFTFSSYGMSWVRQTPEKRLEWVATISGGGSYTFYPDSVKGRFTISRDNAKNNLYLQVSSLRSEDTALYYCIYDGSYWGQGTLVTVSA

SEQ ID NO: 173 - protein, 120 aa, Artificial Sequence
  Full-Length sequence of the Heavy Chain of H5S14-24AH as described in Table 3.
EVQLQQSGPELVKPGTSVKISCKTSGYTITEYTMHWVKQSHGKSLEWIGGINPNNGGTINNQKFKDKATLTVDMSSSTAYMELRSLTSEDSAVYYCAGSVVDRYWYFDVWGAGTTVTVSS

SEQ ID NO: 174 - protein, 120 aa, Artificial Sequence
  Full-Length sequence of the Heavy Chain of H5S14-4AH as described in Table 3.
EVQLQQSGPELVKPGASVKISCKTSGYTFTEYTMHWVKQSHGKSLEWIGGINPYNGGTINNQKFKGKATLTVDMSSSTAYMELRSLTSEDSAVYYCAGSVVDRYWYFDVWGAGTTVTVSS

SEQ ID NO: 175 - protein, 120 aa, Artificial Sequence
  Full-Length sequence of the Heavy Chain of H5S14-7AH as described in Table 3.
EVQLQQSGPELVKPGASVKISCKTSGYTFTEYTMHWVKQSHGKSLEWIGGINPNNGGTINNQKFKGKATLTVDMSSSTAYMELRSLTSEDSAVYYCAGSVVDRYWYFDVWGAGTTVTVSS

SEQ ID NO: 176 - protein, 120 aa, Artificial Sequence
  Full-Length sequence of the Heavy Chain of ITI_040H as described in Table 3.
EVQLQQSGPELVKPGTSVKISCKTSGYTFTEYTMHWVKQSHGKSLEWIGGINPNNGGTINNQKFKGKATLTVDMSSSTAYMELRSLTSEDSAVYYCAGSVVDRYWYFDVWGAGTTVTVSS

SEQ ID NO: 177 - protein, 119 aa, Artificial Sequence
  Full-Length sequence of the Heavy Chain of H5S14-2AH as described in Table 3.
QVQLQQPGAELVKPGTSVKMSCKASGYTFTSYWMHWVKQRPGQGLEWIGDIYPGSDSTNYNEKFKSKATLTVDTSSSTAYMQLSSLTSEDSAVYYCARSGYYGSYLDYWGQGTTLTVSS

SEQ ID NO: 178 - protein, 116 aa, Artificial Sequence
  Full-Length sequence of the Heavy Chain of H5S15-27AH as described in Table 3.
EVQLQQSGAELVKPGASVKLSCTASGFNIKDTYMHWVKQRPEQGLEWIGRIDPANGNTKYDPKFQGKATITADTSSNTAYLQLSSLTSEDTAVYYCARSRRYFDVWGAGTTVTVSS

SEQ ID NO: 179 - protein, 117 aa, Artificial Sequence
  Full-Length sequence of the Heavy Chain of H5S20-22AH as described in Table 3.
EVQLQQSGAELVKPGASVKLSCTASGFNIKDTYMHWVKQRPEQGLEWIGRIDPANGNTKYAPKFQGKATITADTSSNTAYLQLSSLTSEDTAVYYCARSFGNYFDYWGQGTTLTVSS

SEQ ID NO: 180 - protein, 114 aa, Artificial Sequence
  Full-Length sequence of the Heavy Chain of ITI_237H as described in Table 3.
LQQSGAGLVKPGASVKLSCKASGYTFTEYIIYWVKQRSGQGLEWIGWFYPGSGSIRYNEKFKDKATLTADKSSTTVYMDLSRLTSEDSAVYFCARHEDGYLDYWGQGTTLTVSS

SEQ ID NO: 181 - protein, 118 aa, Artificial Sequence
  Full-Length sequence of the Heavy Chain of H5S15-21AH as described in Table 3.
QIQLVQSGPDLKKPGETVKISCKASGYTFTNYGMNWVKQAPGKDLKWMGWINTYTGEPTYADDFKGRFAFSLETSASTAYLQINNLKNDDTATYFCARSINYDSDEKWGQGTSVTVSS

SEQ ID NO: 182 - protein, 120 aa, Artificial Sequence
  Full-Length sequence of the Heavy Chain of H5S20-26AH as described in Table 3.
QIQLVQSGPELKKPGETVKISCRASGYTFTNYGMNWVKQAPGKGLKWMGWINTYTGEPTYADDFKGRFAFSLETSASSAYLQINNLKNEDMATYFCARSLYYGDNYEAYWGQGTLVTVSA

SEQ ID NO: 183 - protein, 120 aa, Artificial Sequence
  Full-Length sequence of the Heavy Chain of ITI_127H as described in Table 3.
QIQLVQSGPEVKKHGETVKISCKASGYIFTNYGINWVKQAPGKGLKWMGWINTYTREPTYADDFKGRFAFSLETSASSAYLQISNLTTEDMATYFCARSLYYVNNYEAYWGQGTLVTVSA

SEQ ID NO: 184 - protein, 119 aa, Artificial Sequence
  Full-Length sequence of the Heavy Chain of ITI_128H as described in Table 3.
QIQLVQSGPELKKHGETVRISCKASGYIFTDYGINWVKQAPGKGLKWMGWINTYTGKPTYADDFKGRFAFSLETSASTAYLQINNLKTEDMATYFCARSLYYGNNYEACWGQGTLVTVS

SEQ ID NO: 185 - protein, 113 aa, Artificial Sequence
  Full-Length sequence of the Heavy Chain of H5S15-6AH as described in Table 3.
QVQLQQSGAELVRPGTSVKMSCKAAGYTFTNSWIGWVKQRPGHGLEWIGDIYPGGAYTKYNEKFKGKATLTADTSSSTAYMQLSSLTSEDSAIYYCASGRDYWGQGTTLTVSS

SEQ ID NO: 186 - protein, 111 aa, Artificial Sequence
  Full-Length sequence of the Heavy Chain of ITI_045H as described in Table 3.
QVQLKQSGPGLVQPSQNLSITCTVSGFSLTSYGVHWIRQSPGKGLEWLGVIWSGGGTDYNAAFISRLSISKDNSKSQVFFKMNSLQADDTAIYYCASLYYWGQGTLVTVSA

SEQ ID NO: 187 - protein, 111 aa, Artificial Sequence
  Full-Length sequence of the Heavy Chain of ITI_046H as described in Table 3.
QVQLKQSGPGLVQPSQNLSITCTVSGFSLTSYGVHWIRQSPGKGLEWLGVIWSGGGTDYNAAFISRLTISKDNSKSQVFFKMNSLQADDTAIYYCASLYYWGQGTLVTVSA

SEQ ID NO: 188 - protein, 116 aa, Artificial Sequence
  Full-Length sequence of the Heavy Chain of H5S15-29AH as described in Table 3.
EVQLQQSGAELVRPGALVKLSCKASGFNIKDDYMHWVKQRPEQGLEWIGWIDPENGNTIYDPKFQGKASITADTSSNTAYLQLSSLTSEDTAVYYCARGYSSSPYWGQGTLVTVSA

SEQ ID NO: 189 - protein, 116 aa, Artificial Sequence
  Full-Length sequence of the Heavy Chain of H5S15-2AH as described in Table 3.
EVQLQQSGAELVKPGASVKLSCTASGFNIKDTYMHWVKQRPEQGLEWIGRIDPANDNTKYDPKFQGKATITADTSSNTAYLQLSSLTSEDTAVYYCARVYYAMDYWGQGTSVTVSS

SEQ ID NO: 190 - protein, 115 aa, Artificial Sequence
  Full-Length sequence of the Heavy Chain of H5S19-24AH as described in Table 3.
QVQLQQSGGELLRPGTSVKVSCKASGYAFTNYLIEWVKQRPGQGLEWIGVINPGSGGIYYKEKFKDKAILTADKSSSTAYMQLSSLTSDDSAVYFCARGDAMDFWGQGTSVTVSS

SEQ ID NO: 191 - protein, 117 aa, Artificial Sequence
  Full-Length sequence of the Heavy Chain of H5S14-1AH as described in Table 3.
DVKLVESGGGLVKPGGSLKLSCAASVFTFSRYTMSWVRQTPEKRLEWVATISSGGSYTYYPDSVKGRFTISRDNAKNTLYLQMSSLKSEDTAIYYCTRGGDGLFDYWGQGTALTVSS

SEQ ID NO: 192 - protein, 117 aa, Artificial Sequence
  Full-Length sequence of the Heavy Chain of H5S19-5AH as described in Table 3.
DVKLVESGGGLVKPGGSLKLSCAASGFTFSSYTMSWVRQTPEKRLEWVATISSGGSYTYYPDSVKGRFTISRDNAKNTLYLQMSSLKSEDTAMYYCTRGDDYGFDYWGQGTTLTVSS

SEQ ID NO: 193 - protein, 120 aa, Artificial Sequence
  Full-Length sequence of the Heavy Chain of ITI_203H as described in Table 3.
EVQLVESGGDLVKPGGSLKLSCAASGFTFSSYGMSWVRQTPDKRLEWVATISSGGSSTYYPDSVKGRFTISRDNAKNTLYLQMNSLKSEDTAMYYCTRHELGNRSRFPYWGQGTLVTVSA

SEQ ID NO: 194 - protein, 114 aa, Artificial Sequence
  Full-Length sequence of the Heavy Chain of H5S14-21AH as described in Table 3.
QVQLQQPGSELVRPGASVKLSCKASGYTFTSYWMHWVKQRPGQGLEWIGNIYPGSGSTNYDEKFKSKATLTVDTSSSTAYMQLSSLTSEDSAVYYCTIYDGYYWGQGTLVTVSA

SEQ ID NO: 195 - protein, 114 aa, Artificial Sequence
  Full-Length sequence of the Heavy Chain of H5S14-27AH as described in Table 3.
EVKLDETGGGLVQPGRPMKLSCVASGFTFSDYWMNWVRQSPEKGLEWVAQIRNKPYNYETYYSDSVKGRFTISRDDSKSSVYLQMNNLRAEDMGIYYCTWGNYWGQGTTLTVSS

SEQ ID NO: 196 - protein, 113 aa, Artificial Sequence
  Full-Length sequence of the Heavy Chain of H5S14-5AH as described in Table 3.
DVQLQESGPGLVKPSQSLSLTCTVTGYSITSDFAWNWIRQFPGNKLEWMGYIVYSGSTSYNPSLKSRISITRDTSKNQFFLQLNSVTAEDTATYFCTRGMDYWGQGTSVTVSS

SEQ ID NO: 197 - protein, 118 aa, Artificial Sequence
  Full-Length sequence of the Heavy Chain of H5S19-1AH as described in Table 3.
DVQLQESGPGLVKPSQSLSLTCTVTGYSITSDYAWNWIRQFPGNKLEWMGYIAYSGGTSYSPSLKSRISITRDTSKNQFFLQLNSVTTEDTATYYCVYFKYGGAFAYWGQGTLVTVSA

SEQ ID NO: 198 - protein, 120 aa, Artificial Sequence
  Full-Length sequence of the Heavy Chain of ITI_023H as described in Table 3.
EVQLQQSGAELMSPGASVNLSCTASGFNIKDTYIHWVKQRPEQGLEWIGKIDPANGNTKYDPKFQDKATITTDASSNTAYLQLSSLTSEDTAVYYCTKSLLWSLGGFAYWGQGTLVTVSA

SEQ ID NO: 199 - protein, 114 aa, Artificial Sequence
  Full-Length sequence of the Heavy Chain of H5S14-3AH as described in Table 3.
QIQLVQSGPELKKPGETVKISCKASGYTFTNYGVNWVKQAPGKDLKWMGWINTYTGEPTYADDFKGRFAFSLETSASTAYLQINNLKNEDMATYFCTSRSWVLWGQGTLVTVSA

SEQ ID NO: 200 - protein, 121 aa, Artificial Sequence
  Full-Length sequence of the Heavy Chain of H5S20-27AH as described in Table 3.
EVQLQQSGTVLARPGASVKMSCKASGYSFTSYWMHWLKQRPGQGLEWIGAIYPGNSDTVFNQKFKGKAKLTAVTSATTAYMELSSLTNEDSAVYYCTKEPRTIEGAWFTYWGQGTLVTVSA

SEQ ID NO: 201 - protein, 118 aa, Artificial Sequence
  Full-Length sequence of the Heavy Chain of H5S15-23AH as described in Table 3.
EVQLQQSGTVLARPGASVKMSCKASGYTFTSFWMHWVKQRPGQGLEWIGAISPGNSETTYNQKFTGKAKLTAVTSTSTAYMELSSLTNEDSAVYYCTKIYYDYDDGYWGQGTTLTVSS

SEQ ID NO: 202 - protein, 25 aa, Artificial Sequence
  Framework Region 1 of the Heavy Chain of Consensus Cluster #11 as described in Table 2.
  misc_feature (9)..(9): Xaa is Alanine or Threonine
  misc_feature (11)..(11): Xaa is Leucine or Valine
  misc_feature (12)..(12): Xaa is Valine or Isoleucine
  misc_feature (19)..(19): Xaa is Arginine, Lysine, Glutamine or Methionine
  misc_feature (20)..(20): Xaa is Isoleucine or Methionine
QVQLQQSGXEXXRPGTSVXXSCKAS

SEQ ID NO: 203 - protein, 25 aa, Artificial Sequence
  Framework Region 1 of the Heavy Chain of multiple antibodies as described in Table 2.
QVQLQQSGAELVRPGTSVKISCKAS

SEQ ID NO: 204 - protein, 25 aa, Artificial Sequence
  Framework Region 1 of the Heavy Chain of H5S20-28AH as described in Table 2.
QVQLQQSGAEVVRPGTSVQISCKAS

SEQ ID NO: 205 - protein, 25 aa, Artificial Sequence
  Framework Region 1 of the Heavy Chain of multiple antibodies as described in Table 2.
QVQLQQSGAEVVRPGTSVKISCKAS

SEQ ID NO: 206 - protein, 25 aa, Artificial Sequence
  Framework Region 1 of the Heavy Chain of H5S20-30AH as described in Table 2.
QVQLQQSGTEVVRPGTSVKISCKAS

SEQ ID NO: 207 - protein, 25 aa, Artificial Sequence
  Framework Region 1 of the Heavy Chain of multiple antibodies as described in Table 2.
QVQLQQSGAELVRPGTSVRISCKAS

SEQ ID NO: 208 - protein, 25 aa, Artificial Sequence
  Framework Region 1 of the Heavy Chain of H5S20-36AH as described in Table 2.
QVQLQQSGAELVRPGTSVKMSCKAS

SEQ ID NO: 209 - protein, 25 aa, Artificial Sequence
  Framework Region 1 of the Heavy Chain of H5S20-43AH as described in Table 2.
QVQLQQSGAELVRPGTSVMISCKAS

SEQ ID NO: 210 - protein, 25 aa, Artificial Sequence
  Framework Region 1 of the Heavy Chain of H5S20-7BH as described in Table 2.
QVQLQQSGAELIRPGTSVKISCKAS

SEQ ID NO: 211 - protein, 25 aa, Artificial Sequence
  Framework Region 1 of the Heavy Chain of Consensus Cluster #20 as described in Table 2.
  misc_feature (1)..(1): Xaa is Glutamate or Aspartate
  misc_feature (3)..(3): Xaa is Lysine or Glutamine
  misc_feature (10)..(10): Xaa is Glycine or Aspartate
  misc_feature (12)..(12): Xaa is Valine or Methionine
  misc_feature (13)..(13): Xaa is Lysine, Methionine or Glutamine
  misc_feature (18)..(18): Xaa is Leucine or Arginine
  misc_feature (19)..(19): Xaa is Lysine or Arginine
XVXLVESGGXLXXPGGSXXLSCAAS

SEQ ID NO: 212 - protein, 25 aa, Artificial Sequence
  Framework Region 1 of the Heavy Chain of H5S14-11AH as described in Table 2.
EVKLVESGGGLVKPGGSLRLSCAAS

SEQ ID NO: 213 - protein, 25 aa, Artificial Sequence
  Framework Region 1 of the Heavy Chain of H5S14-8AH as described in Table 2.
EVKLVESGGDLVKPGGSLKLSCAAS

SEQ ID NO: 214 - protein, 25 aa, Artificial Sequence
  Framework Region 1 of the Heavy Chain of multiple antibodies as described in Table 2.
DVQLVESGGGLVQPGGSRKLSCAAS

SEQ ID NO: 215 - protein, 25 aa, Artificial Sequence
  Framework Region 1 of the Heavy Chain of multiple antibodies as described in Table 2.
EVKLVESGGGLVKPGGSLKLSCAAS

SEQ ID NO: 216 - protein, 25 aa, Artificial Sequence
  Framework Region 1 of the Heavy Chain of H5S20-14DH as described in Table 2.
EVKLVESGGGLVMPGGSLKLSCAAS

SEQ ID NO: 217 - protein, 25 aa, Artificial Sequence
  Framework Region 1 of the Heavy Chain of H5S20-4AH as described in Table 2.
EVKLVESGGGLMKPGGSLKLSCAAS

SEQ ID NO: 218 - protein, 25 aa, Artificial Sequence
  Framework Region 1 of the Heavy Chain of Consensus Cluster #5 as described in Table 2.
  misc_feature (1)..(1): Xaa is Glutamine or Glycine
  misc_feature (2)..(2): Xaa is Valine or Alanine
  misc_feature (3)..(3): Xaa is Glutamine or Alanine
  misc_feature (4)..(4): Xaa is Leucine or Glutamate
  misc_feature (5)..(5): Xaa is Lysine or Glycine
  misc_feature (6)..(6): Xaa is Glutamate or Valine
  misc_feature (7)..(7): Xaa is Serine or Arginine
  misc_feature (8)..(8): Xaa is Glycine or Arginine
  misc_feature (10)..(10): Xaa is Glycine or Valine
  misc_feature (16)..(16): Xaa is Glutamine or Arginine
  misc_feature (17)..(17): Xaa is Serine or Asparagine
XXXXXXXXPXLVAPSXXLSITCTVS

SEQ ID NO: 219 - protein, 25 aa, Artificial Sequence
  Framework Region 1 of the Heavy Chain of multiple antibodies as described in Table 2.
QVQLKESGPGLVAPSRSLSITCTVS

SEQ ID NO: 220 - protein, 25 aa, Artificial Sequence
  Framework Region 1 of the Heavy Chain of multiple antibodies as described in Table 2.
QVQLKESGPGLVAPSQSLSITCTVS

SEQ ID NO: 221 - protein, 25 aa, Artificial Sequence
  Framework Region 1 of the Heavy Chain of H5S19-20CH as described in Table 2.
QVQLKESGPVLVAPSQSLSITCTVS

SEQ ID NO: 222 - protein, 25 aa, Artificial Sequence
  Framework Region 1 of the Heavy Chain of multiple antibodies as described in Table 2.
QVQLKESGPGLVAPSQNLSITCTVS

SEQ ID NO: 223 - protein, 25 aa, Artificial Sequence
  Framework Region 1 of the Heavy Chain of ITI_164H as described in Table 2.
GAAEGVRRPGLVAPSQSLSITCTVS

SEQ ID NO: 224 - protein, 25 aa, Artificial Sequence
  Framework Region 1 of the Heavy Chain of Consensus Cluster #23 as described in Table 2.
  misc_feature (1)..(1): Xaa is Glutamate, Aspartate or Glutamine
  misc_feature (3)..(3): Xaa is Glutamine or Lysine
  misc_feature (5)..(5): Xaa is Glutamine, Valine or Lysine
  misc_feature (6)..(6): Xaa is Glutamine or Glutamate
  misc_feature (7)..(7): Xaa is Serine or Proline
  misc_feature (9)..(9): Xaa is Alanine, Proline or Glycine
  misc_feature (10)..(10): Xaa is Glutamate or Glycine
  misc_feature (12)..(12): Xaa is Valine or Methionine
  misc_feature (13)..(13): Xaa is Lysine, Glutamine, Asparagine or Arginine
  misc_feature (15)..(15): Xaa is Glycine or Serine
  misc_feature (16)..(16): Xaa is Alanine, Glycine, Glutamine or Threonine
  misc_feature (17)..(17): Xaa is Serine or Proline
  misc_feature (18)..(18): Xaa is Valine or Leucine
  misc_feature (19)..(19): Xaa is Lysine, Arginine or Serine
  misc_feature (20)..(20): Xaa is Leucine, Methionine or Isoleucine
  misc_feature (21)..(21): Xaa is Serine or Threonine
  misc_feature (23)..(23): Xaa is Threonine, Lysine or Alanine
  misc_feature (24)..(24): Xaa is Alanine, Threonine or Valine
  misc_feature (25)..(25): Xaa is Serine, Threonine, Alanine or Phenylalanine
XVXLXXXGXXLXXPXXXXXXXCXXX

SEQ ID NO: 225 - protein, 25 aa, Artificial Sequence
  Framework Region 1 of the Heavy Chain of multiple antibodies as described in Table 2.
QVQLKQSGPGLVQPSQSLSITCTVS

SEQ ID NO: 226 - protein, 25 aa, Artificial Sequence
  Framework Region 1 of the Heavy Chain of multiple antibodies as described in Table 2.
QVQLQQSGAELVRPGTSVKMSCKAA

SEQ ID NO: 227 - protein, 25 aa, Artificial Sequence
  Framework Region 1 of the Heavy Chain of multiple antibodies as described in Table 2.
QVQLQQSGAELVKPGASVKMSCKAF

SEQ ID NO: 228 - protein, 25 aa, Artificial Sequence
  Framework Region 1 of the Heavy Chain of H5S14-6AH as described in Table 2.
EVKLVESGGGLVQPGGSLRLSCATS

SEQ ID NO: 229 - protein, 25 aa, Artificial Sequence
  Framework Region 1 of the Heavy Chain of multiple antibodies as described in Table 2.
EVQLQQSGAELVKPGASVKLSCTAS

SEQ ID NO: 230 - protein, 25 aa, Artificial Sequence
  Framework Region 1 of the Heavy Chain of multiple antibodies as described in Table 2.
QVQLQQPGAELVKPGAPVKLSCKAS

SEQ ID NO: 231 - protein, 25 aa, Artificial Sequence
  Framework Region 1 of the Heavy Chain of multiple antibodies as described in Table 2.
EVQLQQSGPELVKPGASVKMSCKAS

SEQ ID NO: 232 - protein, 25 aa, Artificial Sequence
  Framework Region 1 of the Heavy Chain of multiple antibodies as described in Table 2.
DVQLQESGPGLVNPSQSLSLTCTVT

SEQ ID NO: 233 - protein, 25 aa, Artificial Sequence
  Framework Region 1 of the Heavy Chain of H5S19-25AH as described in Table 2.
QVQLQQSGAELMKPGASVKISCKAT

SEQ ID NO: 234 - protein, 25 aa, Artificial Sequence
  Framework Region 1 of the Heavy Chain of multiple antibodies as described in Table 2.
EVQLVESGGGLVKPGGSLKLSCAAS

SEQ ID NO: 235 - protein, 25 aa, Artificial Sequence
  Framework Region 1 of the Heavy Chain of multiple antibodies as described in Table 2.
DVQLQESGPGLVKPSQSLSLTCTVT

SEQ ID NO: 236 - protein, 25 aa, Artificial Sequence
  Framework Region 1 of the Heavy Chain of Consensus Cluster #21 as described in Table 2.
  misc_feature (1)..(1): Xaa is Glutamine or Glutamate
  misc_feature (7)..(7): Xaa is Proline or Serine
  misc_feature (10)..(10): Xaa is Glutamate or Aspartate
  misc_feature (12)..(12): Xaa is Valine or Leucine
  misc_feature (13)..(13): Xaa is Lysine or Arginine
  misc_feature (16)..(16): Xaa is Alanine or Threonine
  misc_feature (17)..(17): Xaa is Proline or Serine
  misc_feature (19)..(19): Xaa is Lysine, Arginine or Methionine
  misc_feature (20)..(20): Xaa is Leucine or Valine
  misc_feature (23)..(23): Xaa is Lysine or Threonine
XVQLQQXGAXLXXPGXXVXXSCXAS

SEQ ID NO: 237 - protein, 25 aa, Artificial Sequence
  Framework Region 1 of the Heavy Chain of multiple antibodies as described in Table 2.
EVQLQQSGADLVKPGASVKLSCTAS

SEQ ID NO: 238 - protein, 25 aa, Artificial Sequence
  Framework Region 1 of the Heavy Chain of H5S20-58AH as described in Table 2.
EVQLQQSGAELVKPGASVMLSCTAS

SEQ ID NO: 239 - protein, 25 aa, Artificial Sequence
  Framework Region 1 of the Heavy Chain of ITI_091H as described in Table 2.
EVQLQQSGAELLKPGASVRLSCTAS

SEQ ID NO: 240 - protein, 25 aa, Artificial Sequence
  Framework Region 1 of the Heavy Chain of multiple antibodies as described in Table 2.
QVQLQQSGAELVRPGTSVKVSCKAS

SEQ ID NO: 241 - protein, 25 aa, Artificial Sequence
  Framework Region 1 of the Heavy Chain of Consensus Cluster #10 as described in Table 2.
  misc_feature (1)..(1): Xaa is Glutamate or Glutamine
  misc_feature (3)..(3): Xaa is Glutamine or Threonine
  misc_feature (5)..(5): Xaa is Glutamine, Valine or Lysine
  misc_feature (6)..(6): Xaa is Glutamine or Glutamate
  misc_feature (7)..(7): Xaa is Serine or Proline
  misc_feature (9)..(9): Xaa is Proline, Alanine or Glycine
  misc_feature (10)..(10): Xaa is Glutamate or Glycine
  misc_feature (11)..(11): Xaa is Leucine or Isoleucine
  misc_feature (12)..(12): Xaa is Valine or Leucine
  misc_feature (13)..(13): Xaa is Lysine, Arginine or Glutamine
  misc_feature (15)..(15): Xaa is Glycine or Serine
  misc_feature (16)..(16): Xaa is Alanine, Threonine, Glycine or Glutamine
  misc_feature (17)..(17): Xaa is Serine or Threonine
  misc_feature (18)..(18): Xaa is Valine or Leucine
  misc_feature (19)..(19): Xaa is Lysine, Methionine or Serine
  misc_feature (20)..(20): Xaa is Methionine, Leucine, Isoleucine or Valine
  misc_feature (21)..(21): Xaa is Serine or Threonine
  misc_feature (23)..(23): Xaa is Lysine, Alanine, Serine or Threonine
  misc_feature (24)..(24): Xaa is Alanine, Phenylalanine or Valine
XVXLXXXGXXXXXPXXXXXXXCXXS

SEQ ID NO: 242 - protein, 25 aa, Artificial Sequence
  Framework Region 1 of the Heavy Chain of H5S14-10AH as described in Table 2.
QVTLKESGPGILQPSQTLSLTCSFS

SEQ ID NO: 243 - protein, 25 aa, Artificial Sequence
  Framework Region 1 of the Heavy Chain of H5S14-20AH as described in Table 2.
QVQLQQPGAELVRPGASVKLSCKAS

SEQ ID NO: 244 - protein, 25 aa, Artificial Sequence
  Framework Region 1 of the Heavy Chain of H5S20-21AH as described in Table 2.
QVQLQQPGAELVKPGASVMMSCKAS

SEQ ID NO: 245 - protein, 25 aa, Artificial Sequence
  Framework Region 1 of the Heavy Chain of Consensus Cluster #8 as described in Table 2.
  misc_feature (11)..(11): Xaa is Leucine or Valine
QIQLVQSGPEXKKPGETVKISCKAS

SEQ ID NO: 246 - protein, 25 aa, Artificial Sequence
  Framework Region 1 of the Heavy Chain of H5S15-15AH as described in Table 2.
QIQLVQSGPEVKKPGETVKISCKAS

SEQ ID NO: 247 - protein, 25 aa, Artificial Sequence
  Framework Region 1 of the Heavy Chain of multiple antibodies as described in Table 2.
QIQLVQSGPELKKPGETVKISCKAS

SEQ ID NO: 248 - protein, 25 aa, Artificial Sequence
  Framework Region 1 of the Heavy Chain of Consensus Cluster #15 as described in Table 2.
  misc_feature (1)..(1): Xaa is Glutamate, no amino acid or Glutamine
  misc_feature (2)..(2): Xaa is Valine or no amino acid
  misc_feature (3)..(3): Xaa is Glutamine, no amino acid or Lysine
  misc_feature (4)..(4): Xaa is Leucine or no amino acid
  misc_feature (5)..(5): Xaa is Valine, no amino acid, Glutamine or Lysine
  misc_feature (6)..(6): Xaa is Glutamate, no amino acid or Glutamine
  misc_feature (7)..(7): Xaa is Serine, no amino acid or Threonine
  misc_feature (8)..(8): Xaa is Glycine or no amino acid
  misc_feature (9)..(9): Xaa is Glycine, no amino acid or Proline
  misc_feature (10)..(10): Xaa is Aspartate, no amino acid, Glycine or Glutamate
  misc_feature (13)..(13): Xaa is Lysine or Glutamine
  misc_feature (14)..(14): Xaa is Proline or Threonine
  misc_feature (15)..(15): Xaa is Glycine, Serine or Lysine
  misc_feature (16)..(16): Xaa is Glycine, Alanine or Glutamine
  misc_feature (18)..(18): Xaa is Leucine or Valine
  misc_feature (19)..(19): Xaa is Lysine or Serine
  misc_feature (20)..(20): Xaa is Leucine, Isoleucine or Methionine
  misc_feature (21)..(21): Xaa is Serine or Threonine
  misc_feature (23)..(23): Xaa is Alanine, Lysine or Threonine
  misc_feature (24)..(24): Xaa is Alanine or Valine
XXXXXXXXXXLVXXXXSXXXXCXXS

SEQ ID NO: 249 - protein, 25 aa, Artificial Sequence
  Framework Region 1 of the Heavy Chain of H5S14-18AH as described in Table 2.
EVQLVETGGGLVQPKGSLKLSCAAS

SEQ ID NO: 250 - protein, 15 aa, Artificial Sequence
  Framework Region 1 of the Heavy Chain of H5S14-23AH as described in Table 2.
LVKTGASVKISCKAS

SEQ ID NO: 251 - protein, 25 aa, Artificial Sequence
  Framework Region 1 of the Heavy Chain of multiple antibodies as described in Table 2.
EVQLVESGGDLVKPGGSLKLSCAAS

SEQ ID NO: 252 - protein, 25 aa, Artificial Sequence
  Framework Region 1 of the Heavy Chain of multiple antibodies as described in Table 2.
EVKLVESGGGLVQPGGSLKLSCAAS

SEQ ID NO: 253 - protein, 25 aa, Artificial Sequence
  Framework Region 1 of the Heavy Chain of Consensus Cluster #19 as described in Table 2.
  misc_feature: Framework Region 1 of the Heavy Chain of Consensus Cluster #19 as described in Table 2.
  misc_feature (2)..(2): Xaa is Valine or Isoleucine
  misc_feature (5)..(5): Xaa is Lysine or Valine
  misc_feature (6)..(6): Xaa is Glutamate or Glutamine
  misc_feature (10)..(10): Xaa is Glycine or Glutamate
  misc_feature (12)..(12): Xaa is Valine or Lysine
  misc_feature (13)..(13): Xaa is Alanine or Lysine
  misc_feature (15)..(15): Xaa is Serine or Glycine
  misc_feature (16)..(16): Xaa is Glutamine or Glutamate
  misc_feature (17)..(17): Xaa is Serine or Threonine
  misc_feature (18)..(18): Xaa is Leucine or Valine
  misc_feature (19)..(19): Xaa is Serine or Lysine
  misc_feature (21)..(21): Xaa is Threonine or Serine
  misc_feature (23)..(23): Xaa is Threonine or Lysine
  misc_feature (24)..(24): Xaa is Valine or Alanine
QXQLXXSGPXLXXPXXXXXIXCXXS

SEQ ID NO: 254 - protein, 25 aa, Artificial Sequence
  Framework Region 1 of the Heavy Chain of Consensus Cluster #14 as described in Table 2.
  misc_feature (1)..(1): Xaa is Glutamine or Glutamate
  misc_feature (2)..(2): Xaa is Isoleucine or Valine
  misc_feature (5)..(5): Xaa is Valine, Glutamine or Lysine
  misc_feature (7)..(7): Xaa is Serine or Proline
  misc_feature (9)..(9): Xaa is Proline or Alanine
  misc_feature (10)..(10): Xaa is Glutamate or Glycine
  misc_feature (12)..(12): Xaa is Lysine or Valine
  misc_feature (13)..(13): Xaa is Lysine, Glutamine or Methionine
  misc_feature (15)..(15): Xaa is Glycine or Serine
  misc_feature (16)..(16): Xaa is Glutamate, Alanine or Glutamine
  misc_feature (17)..(17): Xaa is Threonine or Serine
  misc_feature (18)..(18): Xaa is Valine or Leucine
  misc_feature (19)..(19): Xaa is Lysine or Serine
  misc_feature (20)..(20): Xaa is Isoleucine or Methionine
  misc_feature (21)..(21): Xaa is Serine or Threonine
  misc_feature (23)..(23): Xaa is Lysine or Threonine
  misc_feature (24)..(24): Xaa is Alanine or Valine
  misc_feature (25)..(25): Xaa is Serine or Phenylalanine
XXQLXQXGXXLXXPXXXXXXXCXXX

SEQ ID NO: 255 - protein, 25 aa, Artificial Sequence
  Framework Region 1 of the Heavy Chain of ITI_238H as described in Table 2.
QVQLQQPGAELVMPGASVKMSCKAS

SEQ ID NO: 256 - protein, 25 aa, Artificial Sequence
  Framework Region 1 of the Heavy Chain of Consensus Cluster #6 as described in Table 2.
  misc_feature (23)..(23): Xaa is Alanine or Threonine
  misc_feature (24)..(24): Xaa is Alanine or Threonine
EVQLQQSGAELVRSGASVKLSCXXS

SEQ ID NO: 257 - protein, 25 aa, Artificial Sequence
  Framework Region 1 of the Heavy Chain of multiple antibodies as described in Table 2.
EVQLQQSGAELVRSGASVKLSCTAS

SEQ ID NO: 258 - protein, 25 aa, Artificial Sequence
  Framework Region 1 of the Heavy Chain of multiple antibodies as described in Table 2.
EVQLQQSGAELVRSGASVKLSCTTS

SEQ ID NO: 259 - protein, 25 aa, Artificial Sequence
  Framework Region 1 of the Heavy Chain of H5S20-45AH as described in Table 2.
EVQLQQSGAELVRSGASVKLSCAAS

SEQ ID NO: 260 - protein, 25 aa, Artificial Sequence
  Framework Region 1 of the Heavy Chain of Consensus Cluster #12 as described in Table 2.
  misc_feature (1)..(1): Xaa is Glutamate or Glutamine
  misc_feature (3)..(3): Xaa is Lysine or Glutamine
  misc_feature (5)..(5): Xaa is Valine, Lysine or Glutamine
  misc_feature (6)..(6): Xaa is Glutamate or Glutamine
  misc_feature (9)..(9): Xaa is Glycine, Proline or Alanine
  misc_feature (10)..(10): Xaa is Glycine or Glutamate
  misc_feature (13)..(13): Xaa is Lysine, Alanine or Arginine
  misc_feature (15)..(15): Xaa is Glycine or Serine
  misc_feature (16)..(16): Xaa is Glycine, Glutamine or Threonine
  misc_feature (18)..(18): Xaa is Leucine or Valine
  misc_feature (19)..(19): Xaa is Lysine or Serine
  misc_feature (20)..(20): Xaa is Leucine, Isoleucine or Methionine
  misc_feature (21)..(21): Xaa is Serine or Threonine
  misc_feature (23)..(23): Xaa is Alanine, Threonine or Lysine
  misc_feature (24)..(24): Xaa is Alanine or Valine
  misc_feature (25)..(25): Xaa is Serine or Alanine
XVXLXXSGXXLVXPXXSXXXXCXXX

SEQ ID NO: 261 - protein, 25 aa, Artificial Sequence
  Framework Region 1 of the Heavy Chain of Consensus Cluster #4 as described in Table 2.
  misc_feature (16)..(16): Xaa is Alanine or Threonine
EVQLQQSGPELVKPGXSVKISCKTS

SEQ ID NO: 262 - protein, 25 aa, Artificial Sequence
  Framework Region 1 of the Heavy Chain of multiple antibodies as described in Table 2.
EVQLQQSGPELVKPGTSVKISCKTS

SEQ ID NO: 263 - protein, 25 aa, Artificial Sequence
  Framework Region 1 of the Heavy Chain of multiple antibodies as described in Table 2.
EVQLQQSGPELVKPGASVKISCKTS

SEQ ID NO: 264 - protein, 25 aa, Artificial Sequence
  Framework Region 1 of the Heavy Chain of Consensus Cluster #9 as described in Table 2.
  misc_feature (1)..(1): Xaa is Glutamate, no amino acid or Glutamine
  misc_feature (2)..(2): Xaa is Valine or no amino acid
  misc_feature (3)..(3): Xaa is Glutamine or no amino acid
  misc_feature (7)..(7): Xaa is Serine or Proline
  misc_feature (10)..(10): Xaa is Glutamate or Glycine
  misc_feature (16)..(16): Xaa is Alanine or Threonine
  misc_feature (20)..(20): Xaa is Leucine or Methionine
  misc_feature (23)..(23): Xaa is Threonine or Lysine
XXXLQQXGAXLVKPGXSVKXSCXAS

SEQ ID NO: 265 - protein, 25 aa, Artificial Sequence
  Framework Region 1 of the Heavy Chain of H5S14-2AH as described in Table 2.
QVQLQQPGAELVKPGTSVKMSCKAS

SEQ ID NO: 266 - protein, 22 aa, Artificial Sequence
  Framework Region 1 of the Heavy Chain of ITI_237H as described in Table 2.
LQQSGAGLVKPGASVKLSCKAS

SEQ ID NO: 267 - protein, 25 aa, Artificial Sequence
  Framework Region 1 of the Heavy Chain of Consensus Cluster #17 as described in Table 2.
  misc_feature (10)..(10): Xaa is Aspartate or Glutamate
  misc_feature (11)..(11): Xaa is Leucine or Valine
  misc_feature (14)..(14): Xaa is Proline or Histidine
  misc_feature (19)..(19): Xaa is Lysine or Arginine
  misc_feature (23)..(23): Xaa is Lysine or Arginine
QIQLVQSGPXXKKXGETVXISCXAS

SEQ ID NO: 268 - protein, 25 aa, Artificial Sequence
  Framework Region 1 of the Heavy Chain of H5S15-21AH as described in Table 2.
QIQLVQSGPDLKKPGETVKISCKAS

SEQ ID NO: 269 - protein, 25 aa, Artificial Sequence
  Framework Region 1 of the Heavy Chain of H5S20-26AH as described in Table 2.
QIQLVQSGPELKKPGETVKISCRAS

SEQ ID NO: 270 - protein, 25 aa, Artificial Sequence
  Framework Region 1 of the Heavy Chain of ITI_127H as described in Table 2.
QIQLVQSGPEVKKHGETVKISCKAS

SEQ ID NO: 271 - protein, 25 aa, Artificial Sequence
  Framework Region 1 of the Heavy Chain of ITI_128H as described in Table 2.
QIQLVQSGPELKKHGETVRISCKAS

SEQ ID NO: 272 - protein, 25 aa, Artificial Sequence
  Framework Region 1 of the Heavy Chain of Consensus Cluster #7 as described in Table 2.
  misc_feature (5)..(5): Xaa is Glutamine or Lysine
  misc_feature (9)..(9): Xaa is Alanine or Proline
  misc_feature (10)..(10): Xaa is Glutamate or Glycine
  misc_feature (13)..(13): Xaa is Arginine or Glutamine
  misc_feature (15)..(15): Xaa is Glycine or Serine
  misc_feature (16)..(16): Xaa is Threonine or Glutamine
  misc_feature (17)..(17): Xaa is Serine or Asparagine
  misc_feature (18)..(18): Xaa is Valine or Leucine
  misc_feature (19)..(19): Xaa is Lysine or Serine
  misc_feature (20)..(20): Xaa is Methionine or Isoleucine
  misc_feature (21)..(21): Xaa is Serine or Threonine
  misc_feature (23)..(23): Xaa is Lysine or Threonine
  misc_feature (24)..(24): Xaa is Alanine or Valine
  misc_feature (25)..(25): Xaa is Alanine or Serine
QVQLXQSGXXLVXPXXXXXXXCXXX

SEQ ID NO: 273 - protein, 25 aa, Artificial Sequence
  Framework Region 1 of the Heavy Chain of multiple antibodies as described in Table 2.
QVQLKQSGPGLVQPSQNLSITCTVS

SEQ ID NO: 274 - protein, 25 aa, Artificial Sequence
  Framework Region 1 of the Heavy Chain of Consensus Cluster #13 as described in Table 2.
  misc_feature (1)..(1): Xaa is Glutamate or Glutamine
  misc_feature (9)..(9): Xaa is Alanine or Glycine
  misc_feature (12)..(12): Xaa is Valine or Leucine
  misc_feature (13)..(13): Xaa is Arginine or Lysine
  misc_feature (16)..(16): Xaa is Alanine or Threonine
  misc_feature (17)..(17): Xaa is Leucine or Serine
  misc_feature (20)..(20): Xaa is Leucine or Valine
  misc_feature (23)..(23): Xaa is Lysine or Threonine
XVQLQQSGXELXXPGXXVKXSCXAS

SEQ ID NO: 275 - protein, 25 aa, Artificial Sequence
  Framework Region 1 of the Heavy Chain of H5S15-29AH as described in Table 2.
EVQLQQSGAELVRPGALVKLSCKAS

SEQ ID NO: 276 - protein, 25 aa, Artificial Sequence
  Framework Region 1 of the Heavy Chain of H5S19-24AH as described in Table 2.
QVQLQQSGGELLRPGTSVKVSCKAS

SEQ ID NO: 277 - protein, 25 aa, Artificial Sequence
  Framework Region 1 of the Heavy Chain of Consensus Cluster #18 as described in Table 2.
  misc_feature (1)..(1): Xaa is Glutamate or Aspartate
  misc_feature (3)..(3): Xaa is Glutamine or Lysine
  misc_feature (10)..(10): Xaa is Aspartate or Glycine
XVXLVESGGXLVKPGGSLKLSCAAS

SEQ ID NO: 278 - protein, 25 aa, Artificial Sequence
  Framework Region 1 of the Heavy Chain of multiple antibodies as described in Table 2.
DVKLVESGGGLVKPGGSLKLSCAAS

SEQ ID NO: 279 - protein, 25 aa, Artificial Sequence
  Framework Region 1 of the Heavy Chain of Consensus Cluster #22 as described in Table 2.
  misc_feature (1)..(1): Xaa is Glutamine, Aspartate or Glutamate
  misc_feature (3)..(3): Xaa is Glutamine or Lysine
  misc_feature (5)..(5): Xaa is Glutamine or Aspartate
  misc_feature (6)..(6): Xaa is Glutamine or Glutamate
  misc_feature (7)..(7): Xaa is Proline, Serine or Threonine
  misc_feature (9)..(9): Xaa is Serine, Proline or Glycine
  misc_feature (10)..(10): Xaa is Glutamate or Glycine
  misc_feature (13)..(13): Xaa is Arginine, Lysine or Glutamine
  misc_feature (15)..(15): Xaa is Glycine or Serine
  misc_feature (16)..(16): Xaa is Alanine, Glutamine or Arginine
  misc_feature (17)..(17): Xaa is Serine or Proline
  misc_feature (18)..(18): Xaa is Valine, Leucine or Methionine
  misc_feature (19)..(19): Xaa is Lysine or Serine
  misc_feature (21)..(21): Xaa is Serine or Threonine
  misc_feature (23)..(23): Xaa is Lysine, Threonine or Valine
  misc_feature (24)..(24): Xaa is Alanine or Valine
  misc_feature (25)..(25): Xaa is Serine or Threonine
XVXLXXXGXXLVXPXXXXXLXCXXX

SEQ ID NO: 280 - protein, 25 aa, Artificial Sequence
  Framework Region 1 of the Heavy Chain of H5S14-21AH as described in Table 2.
QVQLQQPGSELVRPGASVKLSCKAS

SEQ ID NO: 281 - protein, 25 aa, Artificial Sequence
  Framework Region 1 of the Heavy Chain of H5S14-27AH as described in Table 2.
EVKLDETGGGLVQPGRPMKLSCVAS

SEQ ID NO: 282 - protein, 25 aa, Artificial Sequence
  Framework Region 1 of the Heavy Chain of Consensus Cluster #16 as described in Table 2.
  misc_feature (1)..(1): Xaa is Aspartate or Glutamate
  misc_feature (6)..(6): Xaa is Glutamate or Glutamine
  misc_feature (9)..(9): Xaa is Proline or Alanine
  misc_feature (10)..(10): Xaa is Glycine or Glutamate
  misc_feature (12)..(12): Xaa is Valine or Methionine
  misc_feature (13)..(13): Xaa is Lysine or Serine
  misc_feature (15)..(15): Xaa is Serine or Glycine
  misc_feature (16)..(16): Xaa is Glutamine or Alanine
  misc_feature (18)..(18): Xaa is Leucine or Valine
  misc_feature (19)..(19): Xaa is Serine or Asparagine
  misc_feature (21)..(21): Xaa is Threonine or Serine
  misc_feature (24)..(24): Xaa is Valine or Alanine
  misc_feature (25)..(25): Xaa is Threonine or Serine
XVQLQXSGXXLXXPXXSXXLXCTXX

SEQ ID NO: 283 - protein, 25 aa, Artificial Sequence
  Framework Region 1 of the Heavy Chain of ITI_023H as described in Table 2.
EVQLQQSGAELMSPGASVNLSCTAS

SEQ ID NO: 284 - protein, 25 aa, Artificial Sequence
  Framework Region 1 of the Heavy Chain of Consensus Cluster #2 as described in Table 2.
EVQLQQSGTVLARPGASVKMSCKAS

SEQ ID NO: 285 - protein, 8 aa, Artificial Sequence
  CDR1 of the Heavy Chain of Consensus Cluster #11 as described in Table 2.
  misc_feature (2)..(2): Xaa is Tyrosine, Phenylalanine or Asparagine
  misc_feature (3)..(3): Xaa is Threonine, Arginine, Alanine, Isoleucine or Serine
  misc_feature (4)..(4): Xaa is Leucine or Phenylalanine
  misc_feature (5)..(5): Xaa is Threonine or Isoleucine
  misc_feature (7)..(7): Xaa is Serine or Tyrosine
GXXXXNXW

SEQ ID NO: 286 - protein, 8 aa, Artificial Sequence
  CDR1 of the Heavy Chain of H5S14-12AH as described in Table 2.
GNIFTNSW

SEQ ID NO: 287 - protein, 8 aa, Artificial Sequence
  CDR1 of the Heavy Chain of H5S14-13AH as described in Table 2.
GYIFTNSW

SEQ ID NO: 288 - protein, 8 aa, Artificial Sequence
  CDR1 of the Heavy Chain of H5S14-14AH as described in Table 2.
GYIFTNYW

SEQ ID NO: 289 - protein, 8 aa, Artificial Sequence
  CDR1 of the Heavy Chain of multiple antibodies as described in Table 2.
GYTFTNSW

SEQ ID NO: 290 - protein, 8 aa, Artificial Sequence
  CDR1 of the Heavy Chain of multiple antibodies as described in Table 2.
GYAFTNSW

SEQ ID NO: 291 - protein, 8 aa, Artificial Sequence
  CDR1 of the Heavy Chain of H5S20-23AH as described in Table 2.
GYTLINSW

SEQ ID NO: 292 - protein, 8 aa, Artificial Sequence
  CDR1 of the Heavy Chain of multiple antibodies as described in Table 2.
GYTFTNYW

SEQ ID NO: 293 - protein, 8 aa, Artificial Sequence
  CDR1 of the Heavy Chain of multiple antibodies as described in Table 2.
GFTLTNYW

SEQ ID NO: 294 - protein, 8 aa, Artificial Sequence
  CDR1 of the Heavy Chain of multiple antibodies as described in Table 2.
GYTLTNSW

SEQ ID NO: 295 - protein, 8 aa, Artificial Sequence
  CDR1 of the Heavy Chain of multiple antibodies as described in Table 2.
GYRFTNYW

SEQ ID NO: 296 - protein, 8 aa, Artificial Sequence
  CDR1 of the Heavy Chain of multiple antibodies as described in Table 2.
GYRFTNSW

SEQ ID NO: 297 - protein, 8 aa, Artificial Sequence
  CDR1 of the Heavy Chain of H5S20-62AH as described in Table 2.
GYSFTNYW

SEQ ID NO: 298 - protein, 8 aa, Artificial Sequence
  CDR1 of the Heavy Chain of Consensus Cluster #20 as described in Table 2.
  misc_feature (6)..(6): Xaa is Serine, Asparagine or Aspartate
  misc_feature (7)..(7): Xaa is Tyrosine or Phenylalanine
  misc_feature (8)..(8): Xaa is Alanine or Glycine
GFTFSXXX

SEQ ID NO: 299 - protein, 8 aa, Artificial Sequence
  CDR1 of the Heavy Chain of multiple antibodies as described in Table 2.
GFTFSSFA

SEQ ID NO: 300 - protein, 8 aa, Artificial Sequence
  CDR1 of the Heavy Chain of multiple antibodies as described in Table 2.
GFTFSNYA

SEQ ID NO: 301 - protein, 8 aa, Artificial Sequence
  CDR1 of the Heavy Chain of multiple antibodies as described in Table 2.
GFTFSSFG

SEQ ID NO: 302 - protein, 8 aa, Artificial Sequence
  CDR1 of the Heavy Chain of H5S15-9AH as described in Table 2.
GFTFSDFG

SEQ ID NO: 303 - protein, 8 aa, Artificial Sequence
  CDR1 of the Heavy Chain of multiple antibodies as described in Table 2.
GFTFSSYA

SEQ ID NO: 304 - protein, 8 aa, Artificial Sequence
  CDR1 of the Heavy Chain of Consensus Cluster #5 as described in Table 2.
  misc_feature (5)..(5): Xaa is Threonine or Serine
  misc_feature (6)..(6): Xaa is Isoleucine, Threonine, Serine or Asparagine
GFSLXXYG

SEQ ID NO: 305 - protein, 8 aa, Artificial Sequence
  CDR1 of the Heavy Chain of multiple antibodies as described in Table 2.
GFSLTTYG

SEQ ID NO: 306 - protein, 8 aa, Artificial Sequence
  CDR1 of the Heavy Chain of multiple antibodies as described in Table 2.
GFSLTSYG

SEQ ID NO: 307 - protein, 8 aa, Artificial Sequence
  CDR1 of the Heavy Chain of H5S19-18AH as described in Table 2.
GFSLTIYG

SEQ ID NO: 308 - protein, 8 aa, Artificial Sequence
  CDR1 of the Heavy Chain of H5S19-22AH as described in Table 2.
GFSLTNYG

SEQ ID NO: 309 - protein, 8 aa, Artificial Sequence
  CDR1 of the Heavy Chain of ITI_145H as described in Table 2.
GFSLSTYG

SEQ ID NO: 310 - protein, 9 aa, Artificial Sequence
  CDR1 of the Heavy Chain of Consensus Cluster #23 as described in Table 2.
  misc_feature (2)..(2): Xaa is Phenylalanine or Tyrosine
  misc_feature (3)..(3): Xaa is Asparagine, Threonine or Serine
  misc_feature (4)..(4): Xaa is Isoleucine, Phenylalanine or Leucine
  misc_feature (5)..(5): Xaa is no amino acid or Threonine
  misc_feature (6)..(6): Xaa is Lysine, Threonine, Serine or Asparagine
  misc_feature (7)..(7): Xaa is Aspartate, Serine, Isoleucine, Asparagine or Threonine
  misc_feature (8)..(8): Xaa is Threonine or Tyrosine
  misc_feature (9)..(9): Xaa is Tyrosine, Valine, Alanine, Threonine, Tryptophan, Glycine or Proline
GXXXXXXXX

SEQ ID NO: 311 - protein, 8 aa, Artificial Sequence
  CDR1 of the Heavy Chain of H5S14-15AH as described in Table 2.
GFSLTSYG

SEQ ID NO: 312 - protein, 8 aa, Artificial Sequence
  CDR1 of the Heavy Chain of H5S14-17AH as described in Table 2.
GYTFTNYW

SEQ ID NO: 313 - protein, 8 aa, Artificial Sequence
  CDR1 of the Heavy Chain of H5S14-25AH as described in Table 2.
GYTFTTYP

SEQ ID NO: 314 - protein, 8 aa, Artificial Sequence
  CDR1 of the Heavy Chain of H5S14-6AH as described in Table 2.
GFTFTDYY

SEQ ID NO: 315 - protein, 8 aa, Artificial Sequence
  CDR1 of the Heavy Chain of multiple antibodies as described in Table 2.
GFNIKDTY

SEQ ID NO: 316 - protein, 8 aa, Artificial Sequence
  CDR1 of the Heavy Chain of multiple antibodies as described in Table 2.
GYTFTSYW

SEQ ID NO: 317 - protein, 8 aa, Artificial Sequence
  CDR1 of the Heavy Chain of H5S15-38AH as described in Table 2.
GYTFTSYV

SEQ ID NO: 318 - protein, 9 aa, Artificial Sequence
  CDR1 of the Heavy Chain of multiple antibodies as described in Table 2.
GYSITSDYA

SEQ ID NO: 319 - protein, 8 aa, Artificial Sequence
  CDR1 of the Heavy Chain of H5S19-25AH as described in Table 2.
GYTFSSYW

SEQ ID NO: 320 - protein, 8 aa, Artificial Sequence
  CDR1 of the Heavy Chain of H5S19-6AH as described in Table 2.
GFTFNIYT

SEQ ID NO: 321 - protein, 8 aa, Artificial Sequence
  CDR1 of the Heavy Chain of Consensus Cluster #21 as described in Table 2.
  misc_feature (2)..(2): Xaa is Tyrosine or Phenylalanine
  misc_feature (3)..(3): Xaa is Threonine, Alanine, Asparagine or Tyrosine
  misc_feature (4)..(4): Xaa is Phenylalanine or Isoleucine
  misc_feature (5)..(5): Xaa is Serine, Threonine, Lysine or Arginine
  misc_feature (6)..(6): Xaa is Threonine, Asparagine or Aspartate
  misc_feature (7)..(7): Xaa is Tyrosine or Threonine
  misc_feature (8)..(8): Xaa is Tryptophan, Leucine or Tyrosine
GXXXXXXX

SEQ ID NO: 322 - protein, 8 aa, Artificial Sequence
  CDR1 of the Heavy Chain of multiple antibodies as described in Table 2.
GFNIKDTY

SEQ ID NO: 323 - protein, 8 aa, Artificial Sequence
  CDR1 of the Heavy Chain of H5S15-37AH as described in Table 2.
GYTFSTYW

SEQ ID NO: 324 - protein, 8 aa, Artificial Sequence
  CDR1 of the Heavy Chain of H5S20-58AH as described in Table 2.
GFYIKDTY

SEQ ID NO: 325 - protein, 8 aa, Artificial Sequence
  CDR1 of the Heavy Chain of H5S20-9AH as described in Table 2.
GFNIRDTY

SEQ ID NO: 326 - protein, 8 aa, Artificial Sequence
  CDR1 of the Heavy Chain of ITI_091H as described in Table 2.
GFNFKDTY

SEQ ID NO: 327 - protein, 8 aa, Artificial Sequence
  CDR1 of the Heavy Chain of multiple antibodies as described in Table 2.
GYAFTNYL

SEQ ID NO: 328 - protein, 10 aa, Artificial Sequence
  CDR1 of the Heavy Chain of Consensus Cluster #10 as described in Table 2.
  misc_feature (2)..(2): Xaa is Tyrosine or Phenylalanine
  misc_feature (3)..(3): Xaa is Threonine, Alanine or Serine
  misc_feature (4)..(4): Xaa is Phenylalanine or Leucine
  misc_feature (5)..(5): Xaa is no amino acid or Serine
  misc_feature (6)..(6): Xaa is no amino acid or Threonine
  misc_feature (7)..(7): Xaa is Threonine or Serine
  misc_feature (8)..(8): Xaa is Serine, Asparagine, Aspartate, Glycine or Threonine
  misc_feature (9)..(9): Xaa is Tyrosine or Methionine
  misc_feature (10)..(10): Xaa is Valine, Tryptophan, Aspartate, Tyrosine, Glycine or Leucine
GXXXXXXXXX

SEQ ID NO: 329 - protein, 10 aa, Artificial Sequence
  CDR1 of the Heavy Chain of H5S14-10AH as described in Table 2.
GFSLSTSGMG

SEQ ID NO: 330 - protein, 8 aa, Artificial Sequence
  CDR1 of the Heavy Chain of H5S14-16AH as described in Table 2.
GFTFSDYY

SEQ ID NO: 331 - protein, 8 aa, Artificial Sequence
  CDR1 of the Heavy Chain of multiple antibodies as described in Table 2.
GYTFTNYW

SEQ ID NO: 332 - protein, 8 aa, Artificial Sequence
  CDR1 of the Heavy Chain of multiple antibodies as described in Table 2.
GYTFTSYV

SEQ ID NO: 333 - protein, 8 aa, Artificial Sequence
  CDR1 of the Heavy Chain of H5S14-26AH as described in Table 2.
GYAFTNYL

SEQ ID NO: 334 - protein, 8 aa, Artificial Sequence
  CDR1 of the Heavy Chain of multiple antibodies as described in Table 2.
GFSLTTYG

SEQ ID NO: 335 - protein, 8 aa, Artificial Sequence
  CDR1 of the Heavy Chain of H5S15-40AH as described in Table 2.
GFAFSSYD

SEQ ID NO: 336 - protein, 8 aa, Artificial Sequence
  CDR1 of the Heavy Chain of Consensus Cluster #8 as described in Table 2.
  misc_feature (4)..(4): Xaa is Phenylalanine or Leucine
  misc_feature (7)..(7): Xaa is Tyrosine or Phenylalanine
GYTXTNXG

SEQ ID NO: 337 - protein, 8 aa, Artificial Sequence
  CDR1 of the Heavy Chain of H5S15-15AH as described in Table 2.
GYTLTNYG

SEQ ID NO: 338 - protein, 8 aa, Artificial Sequence
  CDR1 of the Heavy Chain of multiple antibodies as described in Table 2.
GYTFTNYG

SEQ ID NO: 339 - protein, 8 aa, Artificial Sequence
  CDR1 of the Heavy Chain of multiple antibodies as described in Table 2.
GYTFTNFG

SEQ ID NO: 340 - protein, 8 aa, Artificial Sequence
  CDR1 of the Heavy Chain of Consensus Cluster #15 as described in Table 2.
  misc_feature (2)..(2): Xaa is Phenylalanine or Tyrosine
  misc_feature (3)..(3): Xaa is Threonine, Serine or Lysine
  misc_feature (4)..(4): Xaa is Phenylalanine or Leucine
  misc_feature (5)..(5): Xaa is Serine, Threonine or Asparagine
  misc_feature (6)..(6): Xaa is Serine, Glycine or Threonine
  misc_feature (7)..(7): Xaa is Tyrosine or Asparagine
  misc_feature (8)..(8): Xaa is Glycine, Tyrosine, Threonine, Valine or Alanine
GXXXXXXX

SEQ ID NO: 341 - protein, 8 aa, Artificial Sequence
  CDR1 of the Heavy Chain of H5S14-18AH as described in Table 2.
GFTFNTNA

SEQ ID NO: 342 - protein, 8 aa, Artificial Sequence
  CDR1 of the Heavy Chain of H5S14-23AH as described in Table 2.
GYSFTGYY

SEQ ID NO: 343 - protein, 8 aa, Artificial Sequence
  CDR1 of the Heavy Chain of multiple antibodies as described in Table 2.
GFTFSSYG

SEQ ID NO: 344 - protein, 8 aa, Artificial Sequence
  CDR1 of the Heavy Chain of multiple antibodies as described in Table 2.
GYTFTSYV

SEQ ID NO: 345 - protein, 8 aa, Artificial Sequence
  CDR1 of the Heavy Chain of H5S15-25AH as described in Table 2.
GYKFNSYV

SEQ ID NO: 346 - protein, 8 aa, Artificial Sequence
  CDR1 of the Heavy Chain of multiple antibodies as described in Table 2.
GFTFSSYT

SEQ ID NO: 347 - protein, 8 aa, Artificial Sequence
  CDR1 of the Heavy Chain of Consensus Cluster #19 as described in Table 2.
  misc_feature (2)..(2): Xaa is Phenylalanine or Tyrosine
  misc_feature (3)..(3): Xaa is Serine, Threonine or Isoleucine
  misc_feature (4)..(4): Xaa is Leucine or Phenylalanine
  misc_feature (6)..(6): Xaa is Glycine or Asparagine
  misc_feature (7)..(7): Xaa is Tyrosine or Phenylalanine
GXXXTXXG

SEQ ID NO: 348 - protein, 8 aa, Artificial Sequence
  CDR1 of the Heavy Chain of multiple antibodies as described in Table 2.
GFSLTGYG

SEQ ID NO: 349 - protein, 8 aa, Artificial Sequence
  CDR1 of the Heavy Chain of multiple antibodies as described in Table 2.
GYIFTNYG

SEQ ID NO: 350 - protein, 8 aa, Artificial Sequence
  CDR1 of the Heavy Chain of multiple antibodies as described in Table 2.
GYTLTNFG

SEQ ID NO: 351 - protein, 8 aa, Artificial Sequence
  CDR1 of the Heavy Chain of Consensus Cluster #14 as described in Table 2.
  misc_feature (2)..(2): Xaa is Tyrosine or Phenylalanine
  misc_feature (3)..(3): Xaa is Threonine or Serine
  misc_feature (4)..(4): Xaa is Phenylalanine or Leucine
  misc_feature (6)..(6): Xaa is Aspartate, Threonine, Serine or Asparagine
  misc_feature (8)..(8): Xaa is Serine, Proline, Glycine, Valine or Tryptophan
GXXXTXYX

SEQ ID NO: 352 - protein, 8 aa, Artificial Sequence
  CDR1 of the Heavy Chain of H5S15-28AH as described in Table 2.
GYTFTTYP

SEQ ID NO: 353 - protein, 8 aa, Artificial Sequence
  CDR1 of the Heavy Chain of H5S15-39AH as described in Table 2.
GYTFTDYS

SEQ ID NO: 354 - protein, 8 aa, Artificial Sequence
  CDR1 of the Heavy Chain of ITI_238H as described in Table 2.
GYTFTDYW

SEQ ID NO: 355 - protein, 8 aa, Artificial Sequence
  CDR1 of the Heavy Chain of Consensus Cluster #6 as described in Table 2.
GFNIKDYY

SEQ ID NO: 356 - protein, 8 aa, Artificial Sequence
  CDR1 of the Heavy Chain of Consensus Cluster #12 as described in Table 2.
  misc_feature (2)..(2): Xaa is Phenylalanine or Tyrosine
  misc_feature (3)..(3): Xaa is Threonine or Serine
  misc_feature (4)..(4): Xaa is Phenylalanine or Leucine
  misc_feature (5)..(5): Xaa is Serine or Threonine
  misc_feature (6)..(6): Xaa is Serine, Glycine, Aspartate or Asparagine
  misc_feature (7)..(7): Xaa is Tyrosine or Serine
  misc_feature (8)..(8): Xaa is Glycine or Tryptophan
GXXXXXXX

SEQ ID NO: 357 - protein, 8 aa, Artificial Sequence
  CDR1 of the Heavy Chain of H5S15-8AH as described in Table 2.
GYTFTDSW

SEQ ID NO: 358 - protein, 8 aa, Artificial Sequence
  CDR1 of the Heavy Chain of Consensus Cluster #4 as described in Table 2.
  misc_feature (4)..(4): Xaa is Phenylalanine or Isoleucine
GYTXTEYT

SEQ ID NO: 359 - protein, 8 aa, Artificial Sequence
  CDR1 of the Heavy Chain of H5S14-24AH as described in Table 2.
GYTITEYT

SEQ ID NO: 360 - protein, 8 aa, Artificial Sequence
  CDR1 of the Heavy Chain of multiple antibodies as described in Table 2.
GYTFTEYT

SEQ ID NO: 361 - protein, 8 aa, Artificial Sequence
  CDR1 of the Heavy Chain of Consensus Cluster #9 as described in Table 2.
  misc_feature (2)..(2): Xaa is Phenylalanine or Tyrosine
  misc_feature (3)..(3): Xaa is Asparagine or Threonine
  misc_feature (4)..(4): Xaa is Isoleucine or Phenylalanine
  misc_feature (5)..(5): Xaa is Lysine or Threonine
  misc_feature (6)..(6): Xaa is Aspartate, Glutamate or Serine
  misc_feature (7)..(7): Xaa is Threonine or Tyrosine
  misc_feature (8)..(8): Xaa is Tyrosine, Isoleucine or Tryptophan
GXXXXXXX

SEQ ID NO: 362 - protein, 8 aa, Artificial Sequence
  CDR1 of the Heavy Chain of H5S14-2AH as described in Table 2.
GYTFTSYW

SEQ ID NO: 363 - protein, 8 aa, Artificial Sequence
  CDR1 of the Heavy Chain of ITI_237H as described in Table 2.
GYTFTEYI

SEQ ID NO: 364 - protein, 8 aa, Artificial Sequence
  CDR1 of the Heavy Chain of Consensus Cluster #17 as described in Table 2.
  misc_feature (3)..(3): Xaa is Threonine or Isoleucine
  misc_feature (6)..(6): Xaa is Asparagine or Aspartate
GYXFTXYG

SEQ ID NO: 365 - protein, 8 aa, Artificial Sequence
  CDR1 of the Heavy Chain of ITI_128H as described in Table 2.
GYIFTDYG

SEQ ID NO: 366 - protein, 8 aa, Artificial Sequence
  CDR1 of the Heavy Chain of Consensus Cluster #7 as described in Table 2.
  misc_feature (2)..(2): Xaa is Tyrosine or Phenylalanine
  misc_feature (3)..(3): Xaa is Threonine or Serine
  misc_feature (4)..(4): Xaa is Phenylalanine or Leucine
  misc_feature (6)..(6): Xaa is Asparagine or Serine
  misc_feature (7)..(7): Xaa is Serine or Tyrosine
  misc_feature (8)..(8): Xaa is Tryptophan or Glycine
GXXXTXXX

SEQ ID NO: 367 - protein, 8 aa, Artificial Sequence
  CDR1 of the Heavy Chain of Consensus Cluster #13 as described in Table 2.
  misc_feature (2)..(2): Xaa is Phenylalanine or Tyrosine
  misc_feature (3)..(3): Xaa is Asparagine or Alanine
  misc_feature (4)..(4): Xaa is Isoleucine or Phenylalanine
  misc_feature (5)..(5): Xaa is Lysine or Threonine
  misc_feature (6)..(6): Xaa is Aspartate or Asparagine
  misc_feature (7)..(7): Xaa is Aspartate, Threonine or Tyrosine
  misc_feature (8)..(8): Xaa is Tyrosine or Leucine
GXXXXXXX

SEQ ID NO: 368 - protein, 8 aa, Artificial Sequence
  CDR1 of the Heavy Chain of H5S15-29AH as described in Table 2.
GFNIKDDY

SEQ ID NO: 369 - protein, 8 aa, Artificial Sequence
  CDR1 of the Heavy Chain of Consensus Cluster #18 as described in Table 2.
  misc_feature (1)..(1): Xaa is Glycine or Valine
  misc_feature (6)..(6): Xaa is Serine or Arginine
  misc_feature (8)..(8): Xaa is Glycine or Threonine
XFTFSXYX

SEQ ID NO: 370 - protein, 8 aa, Artificial Sequence
  CDR1 of the Heavy Chain of H5S14-1AH as described in Table 2.
VFTFSRYT

SEQ ID NO: 371 - protein, 9 aa, Artificial Sequence
  CDR1 of the Heavy Chain of Consensus Cluster #22 as described in Table 2.
  misc_feature (2)..(2): Xaa is Tyrosine or Phenylalanine
  misc_feature (3)..(3): Xaa is Threonine or Serine
  misc_feature (4)..(4): Xaa is Phenylalanine or Isoleucine
  misc_feature (5)..(5): Xaa is no amino acid or Threonine
  misc_feature (6)..(6): Xaa is Threonine or Serine
  misc_feature (7)..(7): Xaa is Serine or Aspartate
  misc_feature (8)..(8): Xaa is Tyrosine or Phenylalanine
  misc_feature (9)..(9): Xaa is Tryptophan or Alanine
GXXXXXXXX

SEQ ID NO: 372 - protein, 8 aa, Artificial Sequence
  CDR1 of the Heavy Chain of H5S14-27AH as described in Table 2.
GFTFSDYW

SEQ ID NO: 373 - protein, 9 aa, Artificial Sequence
  CDR1 of the Heavy Chain of H5S14-5AH as described in Table 2.
GYSITSDFA

SEQ ID NO: 374 - protein, 9 aa, Artificial Sequence
  CDR1 of the Heavy Chain of Consensus Cluster #16 as described in Table 2.
  misc_feature (2)..(2): Xaa is Tyrosine or Phenylalanine
  misc_feature (3)..(3): Xaa is Serine or Asparagine
  misc_feature (5)..(5): Xaa is Threonine or no amino acid
  misc_feature (6)..(6): Xaa is Serine or Lysine
  misc_feature (8)..(8): Xaa is Tyrosine or Threonine
  misc_feature (9)..(9): Xaa is Alanine or Tyrosine
GXXIXXDXX

SEQ ID NO: 375 - protein, 8 aa, Artificial Sequence
  CDR1 of the Heavy Chain of Consensus Cluster #2 as described in Table 2.
GYSFTSYW

SEQ ID NO: 376 - protein, 8 aa, Artificial Sequence
  CDR1 of the Heavy Chain of Consensus Cluster #3 as described in Table 2.
GYTFTSFW

SEQ ID NO: 377 - protein, 17 aa, Artificial Sequence
  Framework Region 2 of the Heavy Chain of Consensus Cluster #11 as described in Table 2.
  misc_feature (4)..(4): Xaa is Valine or Isoleucine
  misc_feature (5)..(5): Xaa is Lysine or Arginine
  misc_feature (6)..(6): Xaa is Glutamine or Leucine
  misc_feature (7)..(7): Xaa is Arginine or Tryptophan
LGWXXXXPGHGLEWIGD

SEQ ID NO: 378 - protein, 17 aa, Artificial Sequence
  Framework Region 2 of the Heavy Chain of multiple antibodies as described in Table 2.
LGWIKQRPGHGLEWIGD

SEQ ID NO: 379 - protein, 17 aa, Artificial Sequence
  Framework Region 2 of the Heavy Chain of multiple antibodies as described in Table 2.
LGWVKQRPGHGLEWIGD

SEQ ID NO: 380 - protein, 17 aa, Artificial Sequence
  Framework Region 2 of the Heavy Chain of H5S20-32AH as described in Table 2.
LGWVKQWPGHGLEWIGD

SEQ ID NO: 381 - protein, 17 aa, Artificial Sequence
  Framework Region 2 of the Heavy Chain of H5S20-7BH as described in Table 2.
LGWIKLRPGHGLEWIGD

SEQ ID NO: 382 - protein, 17 aa, Artificial Sequence
  Framework Region 2 of the Heavy Chain of ITI_053H as described in Table 2.
LGWVRQRPGHGLEWIGD

SEQ ID NO: 383 - protein, 17 aa, Artificial Sequence
  Framework Region 2 of the Heavy Chain of Consensus Cluster #20 as described in Table 2.
  misc_feature (2)..(2): Xaa is Serine or Histidine
  misc_feature (4)..(4): Xaa is Valine or Isoleucine
  misc_feature (7)..(7): Xaa is Threonine or Alanine
  misc_feature (10)..(10): Xaa is Threonine or Lysine
  misc_feature (11)..(11): Xaa is Arginine or Glycine
  misc_feature (17)..(17): Xaa is Serine or Histidine
MXWXRQXPEXXLEWVAX

SEQ ID NO: 384 - protein, 17 aa, Artificial Sequence
  Framework Region 2 of the Heavy Chain of H5S14-11AH as described in Table 2.
MSWIRQTPEKGLEWVAS

SEQ ID NO: 385 - protein, 17 aa, Artificial Sequence
  Framework Region 2 of the Heavy Chain of multiple antibodies as described in Table 2.
MSWVRQTPEKRLEWVAS

SEQ ID NO: 386 - protein, 17 aa, Artificial Sequence
  Framework Region 2 of the Heavy Chain of H5S15-10AH as described in Table 2.
MHWIRQAPEKGLEWVAS

SEQ ID NO: 387 - protein, 17 aa, Artificial Sequence
  Framework Region 2 of the Heavy Chain of multiple antibodies as described in Table 2.
MHWVRQAPEKGLEWVAH

SEQ ID NO: 388 - protein, 17 aa, Artificial Sequence
  Framework Region 2 of the Heavy Chain of H5S15-20AH as described in Table 2.
MHWVRQAPEKGLEWVAS

SEQ ID NO: 389 - protein, 17 aa, Artificial Sequence
  Framework Region 2 of the Heavy Chain of multiple antibodies as described in Table 2.
MSWVRQTPETRLEWVAS

SEQ ID NO: 390 - protein, 17 aa, Artificial Sequence
  Framework Region 2 of the Heavy Chain of Consensus Cluster #5 as described in Table 2.
  misc_feature (2)..(2): Xaa is Histidine or Tyrosine
  misc_feature (4)..(4): Xaa is Valine or Leucine
  misc_feature (8)..(8): Xaa is Proline or Alanine
VXWXRQPXGKGLEWLGV

SEQ ID NO: 391 - protein, 17 aa, Artificial Sequence
  Framework Region 2 of the Heavy Chain of multiple antibodies as described in Table 2.
VHWVRQPPGKGLEWLGV

SEQ ID NO: 392 - protein, 17 aa, Artificial Sequence
  Framework Region 2 of the Heavy Chain of H5S19-20BH as described in Table 2.
VHWVRQPAGKGLEWLGV

SEQ ID NO: 393 - protein, 17 aa, Artificial Sequence
  Framework Region 2 of the Heavy Chain of H5S19-22AH as described in Table 2.
VHWLRQPPGKGLEWLGV

SEQ ID NO: 394 - protein, 17 aa, Artificial Sequence
  Framework Region 2 of the Heavy Chain of H5S19-26AH as described in Table 2.
VYWVRQPPGKGLEWLGV

SEQ ID NO: 395 - protein, 17 aa, Artificial Sequence
  Framework Region 2 of the Heavy Chain of Consensus Cluster #23 as described in Table 2.
  misc_feature (1)..(1): Xaa is Isoleucine, Methionine, Tryptophan or Valine
  misc_feature (2)..(2): Xaa is Histidine, Serine, Asparagine, Glycine or Glutamate
  misc_feature (4)..(4): Xaa is Valine, Isoleucine or Methionine
  misc_feature (5)..(5): Xaa is Lysine or Arginine
  misc_feature (7)..(7): Xaa is Arginine, Lysine, Threonine, Phenylalanine, Serine or Asparagine
  misc_feature (8)..(8): Xaa is Proline or Histidine
  misc_feature (9)..(9): Xaa is Glutamate or Glycine
  misc_feature (10)..(10): Xaa is Glutamine, Lysine, Asparagine, Methionine, Histidine or Arginine
  misc_feature (11)..(11): Xaa is Glycine, Alanine, Lysine, Arginine or Serine
  misc_feature (15)..(15): Xaa is Isoleucine, Leucine, Methionine or Valine
  misc_feature (16)..(16): Xaa is Glycine or Alanine
  misc_feature (17)..(17): Xaa is Arginine, Tyrosine, Phenylalanine, Glutamate, Aspartate, Valine or Asparagine
XXWXXQXXXXXLEWXXX

SEQ ID NO: 396 - protein, 17 aa, Artificial Sequence
  Framework Region 2 of the Heavy Chain of multiple antibodies as described in Table 2.
VHWVRQSPGKGLEWLGV

SEQ ID NO: 397 - protein, 17 aa, Artificial Sequence
  Framework Region 2 of the Heavy Chain of multiple antibodies as described in Table 2.
IGWVKQRPGHGLEWIGD

SEQ ID NO: 398 - protein, 17 aa, Artificial Sequence
  Framework Region 2 of the Heavy Chain of multiple antibodies as described in Table 2.
IEWMKQNHGKSLEWIGN

SEQ ID NO: 399 - protein, 17 aa, Artificial Sequence
  Framework Region 2 of the Heavy Chain of H5S14-6AH as described in Table 2.
MSWVRQTPGKALEWLGF

SEQ ID NO: 400 - protein, 17 aa, Artificial Sequence
  Framework Region 2 of the Heavy Chain of multiple antibodies as described in Table 2.
MHWVKQRPEQGLEWIGR

SEQ ID NO: 401 - protein, 17 aa, Artificial Sequence
  Framework Region 2 of the Heavy Chain of multiple antibodies as described in Table 2.
MNWVKQRPGRGLEWIGR

SEQ ID NO: 402 - protein, 17 aa, Artificial Sequence
  Framework Region 2 of the Heavy Chain of multiple antibodies as described in Table 2.
MHWVKQKPGQGLEWIGY

SEQ ID NO: 403 - protein, 17 aa, Artificial Sequence
  Framework Region 2 of the Heavy Chain of multiple antibodies as described in Table 2.
WNWIRQFPGNKLEWMGY

SEQ ID NO: 404 - protein, 17 aa, Artificial Sequence
  Framework Region 2 of the Heavy Chain of H5S19-25AH as described in Table 2.
IEWVKQRPGHGLEWIGE

SEQ ID NO: 405 - protein, 17 aa, Artificial Sequence
  Framework Region 2 of the Heavy Chain of H5S19-6AH as described in Table 2.
MSWVRQSPEMRLEWVAE

SEQ ID NO: 406 - protein, 17 aa, Artificial Sequence
  Framework Region 2 of the Heavy Chain of ITI_021H as described in Table 2.
WNWVRQFPGNKLEWVGY

SEQ ID NO: 407 - protein, 17 aa, Artificial Sequence
  Framework Region 2 of the Heavy Chain of ITI_200H as described in Table 2.
IHWVKQRPEQGLEWIGR

SEQ ID NO: 408 - protein, 17 aa, Artificial Sequence
  Framework Region 2 of the Heavy Chain of Consensus Cluster #21 as described in Table 2.
  misc_feature (1)..(1): Xaa is Methionine, Isoleucine or Valine
  misc_feature (2)..(2): Xaa is Asparagine, Glutamate or Histidine
  misc_feature (4)..(4): Xaa is Valine or Leucine
  misc_feature (5)..(5): Xaa is Lysine or Asparagine
  misc_feature (6)..(6): Xaa is Glutamine or Glutamate
  misc_feature (9)..(9): Xaa is Glycine or Glutamate
  misc_feature (10)..(10): Xaa is Arginine or Glutamine
  misc_feature (13)..(13): Xaa is Glutamate or Alanine
  misc_feature (17)..(17): Xaa is Arginine or Valine
XXWXXXRPXXGLXWIGX

SEQ ID NO: 409 - protein, 17 aa, Artificial Sequence
  Framework Region 2 of the Heavy Chain of multiple antibodies as described in Table 2.
MHWVKQRPEQGLAWIGR

SEQ ID NO: 410 - protein, 17 aa, Artificial Sequence
  Framework Region 2 of the Heavy Chain of multiple antibodies as described in Table 2.
MHWVNQRPEQGLEWIGR

SEQ ID NO: 411 - protein, 17 aa, Artificial Sequence
  Framework Region 2 of the Heavy Chain of H5S20-49AH as described in Table 2.
VHWVKERPEQGLEWIGR

SEQ ID NO: 412 - protein, 17 aa, Artificial Sequence
  Framework Region 2 of the Heavy Chain of H5S20-52AH as described in Table 2.
IHWLNQRPEQGLEWIGR

SEQ ID NO: 413 - protein, 17 aa, Artificial Sequence
  Framework Region 2 of the Heavy Chain of multiple antibodies as described in Table 2.
IEWVKQRPGQGLEWIGV

SEQ ID NO: 414 - protein, 17 aa, Artificial Sequence
  Framework Region 2 of the Heavy Chain of Consensus Cluster #10 as described in Table 2.
  misc_feature (1)..(1): Xaa is Methionine, Isoleucine, Leucine or Valine
  misc_feature (2)..(2): Xaa is Histidine, Asparagine, Serine, Tyrosine or Glutamate
  misc_feature (4)..(4): Xaa is Valine or Isoleucine
  misc_feature (5)..(5): Xaa is Lysine or Arginine
  misc_feature (7)..(7): Xaa is Lysine, Arginine, Threonine, Proline or Serine
  misc_feature (8)..(8): Xaa is Proline or Serine
  misc_feature (9)..(9): Xaa is Glycine or Glutamate
  misc_feature (10)..(10): Xaa is Glutamine, Histidine or Lysine
  misc_feature (11)..(11): Xaa is Glycine or Arginine
  misc_feature (15)..(15): Xaa is Isoleucine, Valine or Leucine
  misc_feature (16)..(16): Xaa is Glycine or Alanine
  misc_feature (17)..(17): Xaa is Tyrosine, Valine, Asparagine, Aspartate, Threonine or Histidine
XXWXXQXXXXXLEWXXX

SEQ ID NO: 415 - protein, 17 aa, Artificial Sequence
  Framework Region 2 of the Heavy Chain of H5S14-10AH as described in Table 2.
VSWIRQPSGKGLEWLAH

SEQ ID NO: 416 - protein, 17 aa, Artificial Sequence
  Framework Region 2 of the Heavy Chain of H5S14-16AH as described in Table 2.
MYWVRQTPEKRLEWVAT

SEQ ID NO: 417 - protein, 17 aa, Artificial Sequence
  Framework Region 2 of the Heavy Chain of H5S14-20AH as described in Table 2.
INWVKQRPGQGLEWIGN

SEQ ID NO: 418 - protein, 17 aa, Artificial Sequence
  Framework Region 2 of the Heavy Chain of H5S14-28AH as described in Table 2.
LSWVKQRPGHGLEWIGD

SEQ ID NO: 419 - protein, 17 aa, Artificial Sequence
  Framework Region 2 of the Heavy Chain of multiple antibodies as described in Table 2.
MSWVRQTPEKRLEWVAY

SEQ ID NO: 420 - protein, 17 aa, Artificial Sequence
  Framework Region 2 of the Heavy Chain of H5S20-21AH as described in Table 2.
MHWVRQRPGQGLEWIGV

SEQ ID NO: 421 - protein, 17 aa, Artificial Sequence
  Framework Region 2 of the Heavy Chain of ITI_180H as described in Table 2.
IHWVRQSPGKGLEWLGV

SEQ ID NO: 422 - protein, 17 aa, Artificial Sequence
  Framework Region 2 of the Heavy Chain of Consensus Cluster #8 as described in Table 2.
  misc_feature (1)..(1): Xaa is Methionine or Valine
  misc_feature (11)..(11): Xaa is Glycine or Aspartate
  misc_feature (15)..(15): Xaa is Methionine or Valine
XNWVKQAPGKXLKWXGW

SEQ ID NO: 423 - protein, 17 aa, Artificial Sequence
  Framework Region 2 of the Heavy Chain of multiple antibodies as described in Table 2.
MNWVKQAPGKGLKWVGW

SEQ ID NO: 424 - protein, 17 aa, Artificial Sequence
  Framework Region 2 of the Heavy Chain of multiple antibodies as described in Table 2.
VNWVKQAPGKGLKWMGW

SEQ ID NO: 425 - protein, 17 aa, Artificial Sequence
  Framework Region 2 of the Heavy Chain of multiple antibodies as described in Table 2.
VNWVKQAPGKDLKWMGW

SEQ ID NO: 426 - protein, 17 aa, Artificial Sequence
  Framework Region 2 of the Heavy Chain of multiple antibodies as described in Table 2.
MNWVKQAPGKGLKWMGW

SEQ ID NO: 427 - protein, 17 aa, Artificial Sequence
  Framework Region 2 of the Heavy Chain of Consensus Cluster #15 as described in Table 2.
  misc_feature (1)..(1): Xaa is Methionine or Valine
  misc_feature (2)..(2): Xaa is Serine, Histidine or Asparagine
  misc_feature (5)..(5): Xaa is Arginine or Lysine
  misc_feature (7)..(7): Xaa is Threonine, Serine, Lysine or Alanine
  misc_feature (8)..(8): Xaa is Proline or Histidine
  misc_feature (9)..(9): Xaa is Aspartate, Glycine or Glutamate
  misc_feature (10)..(10): Xaa is Lysine or Glutamine
  misc_feature (11)..(11): Xaa is Arginine, Serine or Glycine
  misc_feature (12)..(12): Xaa is Leucine or Proline
  misc_feature (15)..(15): Xaa is Valine, Isoleucine or Leucine
  misc_feature (16)..(16): Xaa is Alanine or Glycine
  misc_feature (17)..(17): Xaa is Threonine, Tyrosine, Aspartate, Serine, Valine, Glutamate or Arginine
XXWVXQXXXXXXEWXXX

SEQ ID NO: 428 - protein, 17 aa, Artificial Sequence
  Framework Region 2 of the Heavy Chain of H5S14-18AH as described in Table 2.
MNWVRQAPGKGLEWVAR

SEQ ID NO: 429 - protein, 17 aa, Artificial Sequence
  Framework Region 2 of the Heavy Chain of H5S14-23AH as described in Table 2.
MHWVKQSHGKSLEWIGY

SEQ ID NO: 430 - protein, 17 aa, Artificial Sequence
  Framework Region 2 of the Heavy Chain of multiple antibodies as described in Table 2.
MSWVRQTPDKRLEWVAT

SEQ ID NO: 431 - protein, 17 aa, Artificial Sequence
  Framework Region 2 of the Heavy Chain of H5S15-25AH as described in Table 2.
MHWVKQKPGQGPEWIGY

SEQ ID NO: 432 - protein, 17 aa, Artificial Sequence
  Framework Region 2 of the Heavy Chain of H5S20-53AH as described in Table 2.
MSWVRQSPEKRLEWVAE

SEQ ID NO: 433 - protein, 17 aa, Artificial Sequence
  Framework Region 2 of the Heavy Chain of H5S20-55AH as described in Table 2.
MSWVRQTPEKRLEWVAD

SEQ ID NO: 434 - protein, 17 aa, Artificial Sequence
  Framework Region 2 of the Heavy Chain of Consensus Cluster #19 as described in Table 2.
  misc_feature (1)..(1): Xaa is Valine or Methionine
  misc_feature (4)..(4): Xaa is Valine or Methionine
  misc_feature (5)..(5): Xaa is Arginine or Lysine
  misc_feature (7)..(7): Xaa is Proline, Serine or Alanine
  misc_feature (11)..(11): Xaa is Glycine or Aspartate
  misc_feature (13)..(13): Xaa is Glutamate or Lysine
  misc_feature (15)..(15): Xaa is Leucine or Methionine
  misc_feature (17)..(17): Xaa is Methionine or Tryptophan
XNWXXQXPGKXLXWXGX

SEQ ID NO: 435 - protein, 17 aa, Artificial Sequence
  Framework Region 2 of the Heavy Chain of multiple antibodies as described in Table 2.
VNWVRQPPGKGLEWLGM

SEQ ID NO: 436 - protein, 17 aa, Artificial Sequence
  Framework Region 2 of the Heavy Chain of H5S15-32AH as described in Table 2.
VNWVRQSPGKGLEWLGM

SEQ ID NO: 437 - protein, 17 aa, Artificial Sequence
  Framework Region 2 of the Heavy Chain of multiple antibodies as described in Table 2.
MNWVRQAPGKGLKWMGW

SEQ ID NO: 438 - protein, 17 aa, Artificial Sequence
  Framework Region 2 of the Heavy Chain of ITI_100H as described in Table 2.
MNWMKQAPGKGLKWMGW

SEQ ID NO: 439 - protein, 17 aa, Artificial Sequence
  Framework Region 2 of the Heavy Chain of ITI_101H as described in Table 2.
MNWMKQAPGKDLKWMGW

SEQ ID NO: 440 - protein, 17 aa, Artificial Sequence
  Framework Region 2 of the Heavy Chain of Consensus Cluster #14 as described in Table 2.
  misc_feature (1)..(1): Xaa is Methionine, Isoleucine or Valine
  misc_feature (2)..(2): Xaa is Histidine, Glutamate or Asparagine
  misc_feature (4)..(4): Xaa is Valine or Methionine
  misc_feature (5)..(5): Xaa is Lysine or Arginine
  misc_feature (7)..(7): Xaa is Alanine, Asparagine, Serine, Lysine or Arginine
  misc_feature (8)..(8): Xaa is Proline or Histidine
  misc_feature (10)..(10): Xaa is Lysine or Glutamine
  misc_feature (11)..(11): Xaa is Glycine or Serine
  misc_feature (13)..(13): Xaa is Lysine or Glutamate
  misc_feature (15)..(15): Xaa is Methionine, Isoleucine or Leucine
  misc_feature (17)..(17): Xaa is Tryptophan, Asparagine, Valine, Tyrosine or Alanine
XXWXXQXXGXXLXWXGX

SEQ ID NO: 441 - protein, 17 aa, Artificial Sequence
  Framework Region 2 of the Heavy Chain of H5S15-39AH as described in Table 2.
MHWVKQAPGKGLKWMGW

SEQ ID NO: 442 - protein, 17 aa, Artificial Sequence
  Framework Region 2 of the Heavy Chain of multiple antibodies as described in Table 2.
MHWVKQRPGQGLEWIGA

SEQ ID NO: 443 - protein, 17 aa, Artificial Sequence
  Framework Region 2 of the Heavy Chain of Consensus Cluster #6 as described in Table 2.
MHWVKQRPEQGLEWIGW

SEQ ID NO: 444 - protein, 17 aa, Artificial Sequence
  Framework Region 2 of the Heavy Chain of Consensus Cluster #12 as described in Table 2.
  misc_feature (1)..(1): Xaa is Methionine, Valine or Isoleucine
  misc_feature (2)..(2): Xaa is Serine, Asparagine or Glycine
  misc_feature (5)..(5): Xaa is Arginine or Lysine
  misc_feature (7)..(7): Xaa is Threonine, Proline or Arginine
  misc_feature (9)..(9): Xaa is Glutamate or Glycine
  misc_feature (10)..(10): Xaa is Lysine or Histidine
  misc_feature (11)..(11): Xaa is Arginine or Glycine
  misc_feature (15)..(15): Xaa is Valine, Leucine or Isoleucine
  misc_feature (16)..(16): Xaa is Alanine or Glycine
  misc_feature (17)..(17): Xaa is Threonine, Methionine or Aspartate
XXWVXQXPXXXLEWXXX

SEQ ID NO: 445 - protein, 17 aa, Artificial Sequence
  Framework Region 2 of the Heavy Chain of H5S15-26AH as described in Table 2.
MGWVKQRPGHGLEWIAD

SEQ ID NO: 446 - protein, 17 aa, Artificial Sequence
  Framework Region 2 of the Heavy Chain of multiple antibodies as described in Table 2.
MSWVRQTPEKRLEWVAT

SEQ ID NO: 447 - protein, 17 aa, Artificial Sequence
  Framework Region 2 of the Heavy Chain of Consensus Cluster #4 as described in Table 2.
MHWVKQSHGKSLEWIGG

SEQ ID NO: 448 - protein, 17 aa, Artificial Sequence
  Framework Region 2 of the Heavy Chain of Consensus Cluster #9 as described in Table 2.
  misc_feature (1)..(1): Xaa is Methionine or Isoleucine
  misc_feature (2)..(2): Xaa is Histidine or Tyrosine
  misc_feature (8)..(8): Xaa is Proline or Serine
  misc_feature (9)..(9): Xaa is Glutamate or Glycine
  misc_feature (17)..(17): Xaa is Arginine, Tryptophan or Aspartate
XXWVKQRXXQGLEWIGX

SEQ ID NO: 449 - protein, 17 aa, Artificial Sequence
  Framework Region 2 of the Heavy Chain of H5S14-2AH as described in Table 2.
MHWVKQRPGQGLEWIGD

SEQ ID NO: 450 - protein, 17 aa, Artificial Sequence
  Framework Region 2 of the Heavy Chain of ITI_237H as described in Table 2.
IYWVKQRSGQGLEWIGW

SEQ ID NO: 451 - protein, 17 aa, Artificial Sequence
  Framework Region 2 of the Heavy Chain of Consensus Cluster #17 as described in Table 2.
  misc_feature (1)..(1): Xaa is Methionine or Isoleucine
  misc_feature (11)..(11): Xaa is Aspartate or Glycine
XNWVKQAPGKXLKWMGW

SEQ ID NO: 452 - protein, 17 aa, Artificial Sequence
  Framework Region 2 of the Heavy Chain of H5S15-21AH as described in Table 2.
MNWVKQAPGKDLKWMGW

SEQ ID NO: 453 - protein, 17 aa, Artificial Sequence
  Framework Region 2 of the Heavy Chain of multiple antibodies as described in Table 2.
INWVKQAPGKGLKWMGW

SEQ ID NO: 454 - protein, 17 aa, Artificial Sequence
  Framework Region 2 of the Heavy Chain of Consensus Cluster #7 as described in Table 2.
  misc_feature (1)..(1): Xaa is Isoleucine or Valine
  misc_feature (2)..(2): Xaa is Glycine or Histidine
  misc_feature (4)..(4): Xaa is Valine or Isoleucine
  misc_feature (5)..(5): Xaa is Lysine or Arginine
  misc_feature (7)..(7): Xaa is Arginine or Serine
  misc_feature (10)..(10): Xaa is Histidine or Lysine
  misc_feature (15)..(15): Xaa is Isoleucine or Leucine
  misc_feature (17)..(17): Xaa is Aspartate or Valine
XXWXXQXPGXGLEWXGX

SEQ ID NO: 455 - protein, 17 aa, Artificial Sequence
  Framework Region 2 of the Heavy Chain of multiple antibodies as described in Table 2.
VHWIRQSPGKGLEWLGV

SEQ ID NO: 456 - protein, 17 aa, Artificial Sequence
  Framework Region 2 of the Heavy Chain of Consensus Cluster #13 as described in Table 2.
  misc_feature (1)..(1): Xaa is Methionine or Isoleucine
  misc_feature (2)..(2): Xaa is Histidine or Glutamate
  misc_feature (9)..(9): Xaa is Glutamate or Glycine
  misc_feature (17)..(17): Xaa is Tryptophan, Arginine or Valine
XXWVKQRPXQGLEWIGX

SEQ ID NO: 457 - protein, 17 aa, Artificial Sequence
  Framework Region 2 of the Heavy Chain of Consensus Cluster #18 as described in Table 2.
  misc_feature (9)..(9): Xaa is Aspartate or Glutamate
MSWVRQTPXKRLEWVAT

SEQ ID NO: 458 - protein, 17 aa, Artificial Sequence
  Framework Region 2 of the Heavy Chain of Consensus Cluster #22 as described in Table 2.
  misc_feature (1)..(1): Xaa is Methionine or Tryptophan
  misc_feature (2)..(2): Xaa is Histidine or Asparagine
  misc_feature (4)..(4): Xaa is Valine or Isoleucine
  misc_feature (5)..(5): Xaa is Lysine or Arginine
  misc_feature (7)..(7): Xaa is Arginine, Phenylalanine or Serine
  misc_feature (9)..(9): Xaa is Glycine or Glutamate
  misc_feature (10)..(10): Xaa is Glutamine, Asparagine or Lysine
  misc_feature (11)..(11): Xaa is Glycine or Lysine
  misc_feature (15)..(15): Xaa is Isoleucine, Methionine or Valine
  misc_feature (16)..(16): Xaa is Glycine or Alanine
  misc_feature (17)..(17): Xaa is Asparagine, Tyrosine or Glutamine
XXWXXQXPXXXLEWXXX

SEQ ID NO: 459 - protein, 17 aa, Artificial Sequence
  Framework Region 2 of the Heavy Chain of H5S14-21AH as described in Table 2.
MHWVKQRPGQGLEWIGN

SEQ ID NO: 460 - protein, 17 aa, Artificial Sequence
  Framework Region 2 of the Heavy Chain of H5S14-27AH as described in Table 2.
MNWVRQSPEKGLEWVAQ

SEQ ID NO: 461 - protein, 17 aa, Artificial Sequence
  Framework Region 2 of the Heavy Chain of Consensus Cluster #16 as described in Table 2.
  misc_feature (1)..(1): Xaa is Tryptophan or Isoleucine
  misc_feature (2)..(2): Xaa is Asparagine or Histidine
  misc_feature (4)..(4): Xaa is Isoleucine or Valine
  misc_feature (5)..(5): Xaa is Arginine or Lysine
  misc_feature (7)..(7): Xaa is Phenylalanine or Arginine
  misc_feature (9)..(9): Xaa is Glycine or Glutamate
  misc_feature (10)..(10): Xaa is Asparagine or Glutamine
  misc_feature (11)..(11): Xaa is Lysine or Glycine
  misc_feature (15)..(15): Xaa is Methionine or Isoleucine
  misc_feature (17)..(17): Xaa is Tyrosine or Lysine
XXWXXQXPXXXLEWXGX

SEQ ID NO: 462 - protein, 17 aa, Artificial Sequence
  Framework Region 2 of the Heavy Chain of ITI_023H as described in Table 2.
IHWVKQRPEQGLEWIGK

SEQ ID NO: 463 - protein, 17 aa, Artificial Sequence
  Framework Region 2 of the Heavy Chain of Consensus Cluster #2 as described in Table 2.
MHWLKQRPGQGLEWIGA

SEQ ID NO: 464 - protein, 8 aa, Artificial Sequence
  CDR2 of the Heavy Chain of Consensus Cluster #11 as described in Table 2.
  misc_feature (1)..(1): Xaa is Isoleucine or Valine
  misc_feature (8)..(8): Xaa is Threonine, Asparagine, Isoleucine or Alanine
XYPGGGYX

SEQ ID NO: 465 - protein, 8 aa, Artificial Sequence
  CDR2 of the Heavy Chain of multiple antibodies as described in Table 2.
VYPGGGYN

SEQ ID NO: 466 - protein, 8 aa, Artificial Sequence
  CDR2 of the Heavy Chain of multiple antibodies as described in Table 2.
IYPGGGYN

SEQ ID NO: 467 - protein, 8 aa, Artificial Sequence
  CDR2 of the Heavy Chain of multiple antibodies as described in Table 2.
IYPGGGYI

SEQ ID NO: 468 - protein, 8 aa, Artificial Sequence
  CDR2 of the Heavy Chain of multiple antibodies as described in Table 2.
IYPGGGYT

SEQ ID NO: 469 - protein, 8 aa, Artificial Sequence
  CDR2 of the Heavy Chain of H5S20-30AH as described in Table 2.
IYPGGGYA

SEQ ID NO: 470 - protein, 8 aa, Artificial Sequence
  CDR2 of the Heavy Chain of Consensus Cluster #20 as described in Table 2.
  misc_feature (2)..(2): Xaa is Serine or Threonine
  misc_feature (3)..(3): Xaa is Serine or Threonine
  misc_feature (5)..(5): Xaa is no amino acid, Glycine or Serine
  misc_feature (6)..(6): Xaa is Glycine, Threonine or Serine
  misc_feature (7)..(7): Xaa is Aspartate, Asparagine, Serine, Lysine or Threonine
  misc_feature (8)..(8): Xaa is Threonine, Serine or Isoleucine
IXXGXXXX

SEQ ID NO: 471 - protein, 7 aa, Artificial Sequence
  CDR2 of the Heavy Chain of H5S14-11AH as described in Table 2.
ITTGGSS

SEQ ID NO: 472 - protein, 8 aa, Artificial Sequence
  CDR2 of the Heavy Chain of H5S14-8AH as described in Table 2.
ISTGGTTS

SEQ ID NO: 473 - protein, 8 aa, Artificial Sequence
  CDR2 of the Heavy Chain of multiple antibodies as described in Table 2.
ISSGSSTI

SEQ ID NO: 474 - protein, 7 aa, Artificial Sequence
  CDR2 of the Heavy Chain of multiple antibodies as described in Table 2.
ISSGGNT

SEQ ID NO: 475 - protein, 7 aa, Artificial Sequence
  CDR2 of the Heavy Chain of H5S20-1AH as described in Table 2.
ISSGGDT

SEQ ID NO: 476 - protein, 7 aa, Artificial Sequence
  CDR2 of the Heavy Chain of H5S20-37AH as described in Table 2.
ISSGGKT

SEQ ID NO: 477 - protein, 7 aa, Artificial Sequence
  CDR2 of the Heavy Chain of multiple antibodies as described in Table 2.
ISSGGST

SEQ ID NO: 478 - protein, 7 aa, Artificial Sequence
  CDR2 of the Heavy Chain of Consensus Cluster #5 as described in Table 2.
  misc_feature (7)..(7): Xaa is Isoleucine or Threonine
IWAGGIX

SEQ ID NO: 479 - protein, 7 aa, Artificial Sequence
  CDR2 of the Heavy Chain of multiple antibodies as described in Table 2.
IWAGGIT

SEQ ID NO: 480 - protein, 7 aa, Artificial Sequence
  CDR2 of the Heavy Chain of H5S19-18AH as described in Table 2.
IWAGGII

SEQ ID NO: 481 - protein, 10 aa, Artificial Sequence
  CDR2 of the Heavy Chain of Consensus Cluster #23 as described in Table 2.
  misc_feature (1)..(1): Xaa is Isoleucine or Phenylalanine
  misc_feature (2)..(2): Xaa is Aspartate, Asparagine, Arginine, Serine, Tyrosine, Leucine, Tryptophan or Histidine
  misc_feature (3)..(3): Xaa is Proline, Asparagine, Tyrosine or Serine
  misc_feature (4)..(4): Xaa is Alanine, Tyrosine, Glutamine, Serine or Glycine
  misc_feature (5)..(5): Xaa is no amino acid or Alanine
  misc_feature (6)..(6): Xaa is no amino acid or Asparagine
  misc_feature (7)..(7): Xaa is Asparagine, Alanine, no amino acid, Glycine, Serine or Aspartate
  misc_feature (8)..(8): Xaa is Glycine, Aspartate, Tyrosine or Serine
  misc_feature (9)..(9): Xaa is Asparagine, Glycine, Threonine, Histidine, Tyrosine, Serine, Glutamate or Aspartate
  misc_feature (10)..(10): Xaa is Isoleucine or Threonine
XXXXXXXXXX

SEQ ID NO: 482 - protein, 7 aa, Artificial Sequence
  CDR2 of the Heavy Chain of H5S14-15AH as described in Table 2.
IWSGGST

SEQ ID NO: 483 - protein, 8 aa, Artificial Sequence
  CDR2 of the Heavy Chain of H5S14-17AH as described in Table 2.
IYPGGGYT

SEQ ID NO: 484 - protein, 8 aa, Artificial Sequence
  CDR2 of the Heavy Chain of H5S14-25AH as described in Table 2.
FHPYNDDT

SEQ ID NO: 485 - protein, 10 aa, Artificial Sequence
  CDR2 of the Heavy Chain of H5S14-6AH as described in Table 2.
IRNQANAYTT

SEQ ID NO: 486 - protein, 8 aa, Artificial Sequence
  CDR2 of the Heavy Chain of multiple antibodies as described in Table 2.
IDPANGNT

SEQ ID NO: 487 - protein, 8 aa, Artificial Sequence
  CDR2 of the Heavy Chain of H5S15-30AH as described in Table 2.
IDPSDSET

SEQ ID NO: 488 - protein, 8 aa, Artificial Sequence
  CDR2 of the Heavy Chain of H5S15-38AH as described in Table 2.
INPYNDGT

SEQ ID NO: 489 - protein, 7 aa, Artificial Sequence
  CDR2 of the Heavy Chain of H5S19-11AH as described in Table 2.
ISYSGNT

SEQ ID NO: 490 - protein, 8 aa, Artificial Sequence
  CDR2 of the Heavy Chain of H5S19-25AH as described in Table 2.
ILPGSGST

SEQ ID NO: 491 - protein, 8 aa, Artificial Sequence
  CDR2 of the Heavy Chain of H5S19-6AH as described in Table 2.
ISSGGSHT

SEQ ID NO: 492 - protein, 7 aa, Artificial Sequence
  CDR2 of the Heavy Chain of ITI_021H as described in Table 2.
ISYSGST

SEQ ID NO: 493 - protein, 7 aa, Artificial Sequence
  CDR2 of the Heavy Chain of ITI_173H as described in Table 2.
INYSGNT

SEQ ID NO: 494 - protein, 8 aa, Artificial Sequence
  CDR2 of the Heavy Chain of ITI_200H as described in Table 2.
IDPANGNI

SEQ ID NO: 495 - protein, 8 aa, Artificial Sequence
  CDR2 of the Heavy Chain of Consensus Cluster #21 as described in Table 2.
  misc_feature (2)..(2): Xaa is Aspartate, Asparagine or Alanine
  misc_feature (4)..(4): Xaa is Serine, Glycine or Alanine
  misc_feature (5)..(5): Xaa is Aspartate, Serine or Asparagine
  misc_feature (6)..(6): Xaa is Serine, Glycine or Aspartate
  misc_feature (7)..(7): Xaa is Glutamate, Glycine, Asparagine, Lysine, Tyrosine or Arginine
IXPXXXXT

SEQ ID NO: 496 - protein, 8 aa, Artificial Sequence
  CDR2 of the Heavy Chain of multiple antibodies as described in Table 2.
IAPANGRT

SEQ ID NO: 497 - protein, 8 aa, Artificial Sequence
  CDR2 of the Heavy Chain of H5S15-17AH as described in Table 2.
IAPANGKT

SEQ ID NO: 498 - protein, 8 aa, Artificial Sequence
  CDR2 of the Heavy Chain of multiple antibodies as described in Table 2.
IAPANGYT

SEQ ID NO: 499 - protein, 8 aa, Artificial Sequence
  CDR2 of the Heavy Chain of multiple antibodies as described in Table 2.
IDPANGNT

SEQ ID NO: 500 - protein, 8 aa, Artificial Sequence
  CDR2 of the Heavy Chain of H5S15-37AH as described in Table 2.
IDPSDSET

SEQ ID NO: 501 - protein, 8 aa, Artificial Sequence
  CDR2 of the Heavy Chain of multiple antibodies as described in Table 2.
IDPANGKT

SEQ ID NO: 502 - protein, 8 aa, Artificial Sequence
  CDR2 of the Heavy Chain of multiple antibodies as described in Table 2.
IDPANDNT

SEQ ID NO: 503 - protein, 8 aa, Artificial Sequence
  CDR2 of the Heavy Chain of multiple antibodies as described in Table 2.
INPGSGGT

SEQ ID NO: 504 - protein, 8 aa, Artificial Sequence
  CDR2 of the Heavy Chain of Consensus Cluster #10 as described in Table 2.
  misc_feature (2)..(2): Xaa is Asparagine, Aspartate, Tyrosine, Serine or Tryptophan
  misc_feature (3)..(3): Xaa is Proline, Serine, Aspartate or Tryptophan
  misc_feature (4)..(4): Xaa is Tyrosine, Serine, Glycine or Aspartate
  misc_feature (5)..(5): Xaa is Asparagine, Aspartate, Glycine, no amino acid or Serine
  misc_feature (6)..(6): Xaa is Aspartate, Serine or Glycine
  misc_feature (7)..(7): Xaa is Glycine, Phenylalanine, Tyrosine, Serine, Aspartate or Asparagine
  misc_feature (8)..(8): Xaa is Threonine or Lysine
IXXXXXXX

SEQ ID NO: 505 - protein, 7 aa, Artificial Sequence
  CDR2 of the Heavy Chain of H5S14-10AH as described in Table 2.
IYWDDDK

SEQ ID NO: 506 - protein, 8 aa, Artificial Sequence
  CDR2 of the Heavy Chain of H5S14-16AH as described in Table 2.
ISDGGSYT

SEQ ID NO: 507 - protein, 8 aa, Artificial Sequence
  CDR2 of the Heavy Chain of H5S14-20AH as described in Table 2.
IYPSDSYT

SEQ ID NO: 508 - protein, 8 aa, Artificial Sequence
  CDR2 of the Heavy Chain of multiple antibodies as described in Table 2.
INPYNDGT

SEQ ID NO: 509 - protein, 7 aa, Artificial Sequence
  CDR2 of the Heavy Chain of H5S15-33AH as described in Table 2.
IWSGGNT

SEQ ID NO: 510 - protein, 8 aa, Artificial Sequence
  CDR2 of the Heavy Chain of H5S15-40AH as described in Table 2.
ISSGGGST

SEQ ID NO: 511 - protein, 7 aa, Artificial Sequence
  CDR2 of the Heavy Chain of multiple antibodies as described in Table 2.
IWSGGST

SEQ ID NO: 512 - protein, 8 aa, Artificial Sequence
  CDR2 of the Heavy Chain of H5S20-21AH as described in Table 2.
IDPSDSFT

SEQ ID NO: 513 - protein, 8 aa, Artificial Sequence
  CDR2 of the Heavy Chain of Consensus Cluster #8 as described in Table 2.
INTYTGEP

SEQ ID NO: 514 - protein, 10 aa, Artificial Sequence
  CDR2 of the Heavy Chain of Consensus Cluster #15 as described in Table 2.
  misc_feature (2)..(2): Xaa is Serine, Asparagine, Tryptophan or Arginine
  misc_feature (3)..(3): Xaa is Serine, Cysteine, Asparagine, Proline or Arginine
  misc_feature (4)..(4): Xaa is Glycine, Tyrosine or Lysine
  misc_feature (5)..(5): Xaa is no amino acid or Serine
  misc_feature (6)..(6): Xaa is no amino acid or Asparagine
  misc_feature (7)..(7): Xaa is Glycine, Asparagine or no amino acid
  misc_feature (8)..(8): Xaa is Serine, Glycine, Aspartate or Tyrosine
  misc_feature (9)..(9): Xaa is Tyrosine, Alanine, Serine or Aspartate
IXXXXXXXXT

SEQ ID NO: 515 - protein, 10 aa, Artificial Sequence
  CDR2 of the Heavy Chain of H5S14-18AH as described in Table 2.
IRSKSNNYAT

SEQ ID NO: 516 - protein, 8 aa, Artificial Sequence
  CDR2 of the Heavy Chain of H5S14-23AH as described in Table 2.
ISCYNGAT

SEQ ID NO: 517 - protein, 8 aa, Artificial Sequence
  CDR2 of the Heavy Chain of multiple antibodies as described in Table 2.
ISSGGSYT

SEQ ID NO: 518 - protein, 8 aa, Artificial Sequence
  CDR2 of the Heavy Chain of multiple antibodies as described in Table 2.
INPYNDDT

SEQ ID NO: 519 - protein, 8 aa, Artificial Sequence
  CDR2 of the Heavy Chain of multiple antibodies as described in Table 2.
ISNGGGST

SEQ ID NO: 520 - protein, 7 aa, Artificial Sequence
  CDR2 of the Heavy Chain of H5S20-51AH as described in Table 2.
IWRGGST

SEQ ID NO: 521 - protein, 7 aa, Artificial Sequence
  CDR2 of the Heavy Chain of H5S20-59AH as described in Table 2.
ISSGSST

SEQ ID NO: 522 - protein, 8 aa, Artificial Sequence
  CDR2 of the Heavy Chain of Consensus Cluster #19 as described in Table 2.
  misc_feature (2)..(2): Xaa is Tryptophan or Asparagine
  misc_feature (3)..(3): Xaa is Glycine or Threonine
  misc_feature (4)..(4): Xaa is Aspartate or Tyrosine
  misc_feature (5)..(5): Xaa is no amino acid or Threonine
  misc_feature (7)..(7): Xaa is Glycine, Serine or Glutamate
  misc_feature (8)..(8): Xaa is Threonine or Proline
IXXXXGXX

SEQ ID NO: 523 - protein, 7 aa, Artificial Sequence
  CDR2 of the Heavy Chain of H5S15-19AH as described in Table 2.
IWGDGGT

SEQ ID NO: 524 - protein, 7 aa, Artificial Sequence
  CDR2 of the Heavy Chain of H5S15-32AH as described in Table 2.
IWGDGST

SEQ ID NO: 525 - protein, 8 aa, Artificial Sequence
  CDR2 of the Heavy Chain of Consensus Cluster #14 as described in Table 2.
  misc_feature (1)..(1): Xaa is Isoleucine or Phenylalanine
  misc_feature (2)..(2): Xaa is Asparagine, Histidine, Tryptophan or Aspartate
  misc_feature (3)..(3): Xaa is Threonine, Proline or Arginine
  misc_feature (4)..(4): Xaa is Glutamate, Tyrosine, Glycine or Serine
  misc_feature (5)..(5): Xaa is Threonine, Asparagine, no amino acid or Aspartate
  misc_feature (6)..(6): Xaa is Glycine, Aspartate or Serine
  misc_feature (7)..(7): Xaa is Glutamate, Aspartate, Serine, Glycine or Tyrosine
  misc_feature (8)..(8): Xaa is Proline or Threonine
XXXXXXXX

SEQ ID NO: 526 - protein, 7 aa, Artificial Sequence
  CDR2 of the Heavy Chain of H5S15-13AH as described in Table 2.
IWRGGST

SEQ ID NO: 527 - protein, 8 aa, Artificial Sequence
  CDR2 of the Heavy Chain of H5S15-28AH as described in Table 2.
FHPYNDDT

SEQ ID NO: 528 - protein, 8 aa, Artificial Sequence
  CDR2 of the Heavy Chain of H5S15-39AH as described in Table 2.
INTETGEP

SEQ ID NO: 529 - protein, 8 aa, Artificial Sequence
  CDR2 of the Heavy Chain of ITI_238H as described in Table 2.
IDTSDSYT

SEQ ID NO: 530 - protein, 8 aa, Artificial Sequence
  CDR2 of the Heavy Chain of Consensus Cluster #6 as described in Table 2.
IDPENGDT

SEQ ID NO: 531 - protein, 8 aa, Artificial Sequence
  CDR2 of the Heavy Chain of Consensus Cluster #12 as described in Table 2.
  misc_feature (2)..(2): Xaa is Serine, Tryptophan or Tyrosine
  misc_feature (3)..(3): Xaa is Glycine or Proline
  misc_feature (4)..(4): Xaa is Glycine or Aspartate
  misc_feature (5)..(5): Xaa is Glycine or no amino acid
  misc_feature (6)..(6): Xaa is Serine or Glycine
  misc_feature (7)..(7): Xaa is Tyrosine or Asparagine
  misc_feature (8)..(8): Xaa is Threonine or Serine
IXXXXXXX

SEQ ID NO: 532 - protein, 8 aa, Artificial Sequence
  CDR2 of the Heavy Chain of H5S15-26AH as described in Table 2.
IYPGGGYS

SEQ ID NO: 533 - protein, 7 aa, Artificial Sequence
  CDR2 of the Heavy Chain of H5S19-4AH as described in Table 2.
IWGDGNT

SEQ ID NO: 534 - protein, 8 aa, Artificial Sequence
  CDR2 of the Heavy Chain of H5S20-56AH as described in Table 2.
ISGGGSYT

SEQ ID NO: 535 - protein, 8 aa, Artificial Sequence
  CDR2 of the Heavy Chain of Consensus Cluster #4 as described in Table 2.
  misc_feature (4)..(4): Xaa is Tyrosine or Asparagine
INPXNGGT

SEQ ID NO: 536 - protein, 8 aa, Artificial Sequence
  CDR2 of the Heavy Chain of multiple antibodies as described in Table 2.
INPNNGGT

SEQ ID NO: 537 - protein, 8 aa, Artificial Sequence
  CDR2 of the Heavy Chain of H5S14-4AH as described in Table 2.
INPYNGGT

SEQ ID NO: 538 - protein, 8 aa, Artificial Sequence
  CDR2 of the Heavy Chain of Consensus Cluster #9 as described in Table 2.
  misc_feature (1)..(1): Xaa is Isoleucine or Phenylalanine
  misc_feature (2)..(2): Xaa is Aspartate or Tyrosine
  misc_feature (4)..(4): Xaa is Alanine or Glycine
  misc_feature (5)..(5): Xaa is Asparagine or Serine
  misc_feature (6)..(6): Xaa is Glycine or Aspartate
  misc_feature (7)..(7): Xaa is Asparagine or Serine
  misc_feature (8)..(8): Xaa is Threonine or Isoleucine
XXPXXXXX

SEQ ID NO: 539 - protein, 8 aa, Artificial Sequence
  CDR2 of the Heavy Chain of H5S14-2AH as described in Table 2.
IYPGSDST

SEQ ID NO: 540 - protein, 8 aa, Artificial Sequence
  CDR2 of the Heavy Chain of ITI_237H as described in Table 2.
FYPGSGSI

SEQ ID NO: 541 - protein, 8 aa, Artificial Sequence
  CDR2 of the Heavy Chain of Consensus Cluster #17 as described in Table 2.
  misc_feature (6)..(6): Xaa is Glycine or Arginine
  misc_feature (7)..(7): Xaa is Glutamate or Lysine
INTYTXXP

SEQ ID NO: 542 - protein, 8 aa, Artificial Sequence
  CDR2 of the Heavy Chain of ITI_127H as described in Table 2.
INTYTREP

SEQ ID NO: 543 - protein, 8 aa, Artificial Sequence
  CDR2 of the Heavy Chain of ITI_128H as described in Table 2.
INTYTGKP

SEQ ID NO: 544 - protein, 8 aa, Artificial Sequence
  CDR2 of the Heavy Chain of Consensus Cluster #7 as described in Table 2.
  misc_feature (2)..(2): Xaa is Tyrosine or Tryptophan
  misc_feature (3)..(3): Xaa is Proline or Serine
  misc_feature (5)..(5): Xaa is Glycine or no amino acid
  misc_feature (6)..(6): Xaa is Alanine or Glycine
  misc_feature (7)..(7): Xaa is Tyrosine or Glycine
IXXGXXXT

SEQ ID NO: 545 - protein, 8 aa, Artificial Sequence
  CDR2 of the Heavy Chain of H5S15-6AH as described in Table 2.
IYPGGAYT

SEQ ID NO: 546 - protein, 7 aa, Artificial Sequence
  CDR2 of the Heavy Chain of multiple antibodies as described in Table 2.
IWSGGGT

SEQ ID NO: 547 - protein, 8 aa, Artificial Sequence
  CDR2 of the Heavy Chain of Consensus Cluster #13 as described in Table 2.
  misc_feature (2)..(2): Xaa is Aspartate or Asparagine
  misc_feature (4)..(4): Xaa is Glutamate, Alanine or Glycine
  misc_feature (5)..(5): Xaa is Asparagine or Serine
  misc_feature (6)..(6): Xaa is Glycine or Aspartate
  misc_feature (7)..(7): Xaa is Asparagine or Glycine
  misc_feature (8)..(8): Xaa is Threonine or Isoleucine
IXPXXXXX

SEQ ID NO: 548 - protein, 8 aa, Artificial Sequence
  CDR2 of the Heavy Chain of H5S15-29AH as described in Table 2.
IDPENGNT

SEQ ID NO: 549 - protein, 8 aa, Artificial Sequence
  CDR2 of the Heavy Chain of H5S19-24AH as described in Table 2.
INPGSGGI

SEQ ID NO: 550 - protein, 8 aa, Artificial Sequence
  CDR2 of the Heavy Chain of Consensus Cluster #18 as described in Table 2.
  misc_feature (7)..(7): Xaa is Serine or Tyrosine
ISSGGSXT

SEQ ID NO: 551 - protein, 8 aa, Artificial Sequence
  CDR2 of the Heavy Chain of multiple antibodies as described in Table 2.
ISSGGSYT

SEQ ID NO: 552 - protein, 8 aa, Artificial Sequence
  CDR2 of the Heavy Chain of ITI_203H as described in Table 2.
ISSGGSST

SEQ ID NO: 553 - protein, 10 aa, Artificial Sequence
  CDR2 of the Heavy Chain of Consensus Cluster #22 as described in Table 2.
  misc_feature (2)..(2): Xaa is Tyrosine, Valine or Arginine
  misc_feature (3)..(3): Xaa is Proline, Tyrosine or Asparagine
  misc_feature (4)..(4): Xaa is Glycine, Serine or Lysine
  misc_feature (5)..(5): Xaa is no amino acid or Proline
  misc_feature (6)..(6): Xaa is no amino acid or Tyrosine
  misc_feature (7)..(7): Xaa is Serine, no amino acid or Asparagine
  misc_feature (8)..(8): Xaa is Glycine or Tyrosine
  misc_feature (9)..(9): Xaa is Serine or Glutamate
IXXXXXXXXT

SEQ ID NO: 554 - protein, 8 aa, Artificial Sequence
  CDR2 of the Heavy Chain of H5S14-21AH as described in Table 2.
IYPGSGST

SEQ ID NO: 555 - protein, 10 aa, Artificial Sequence
  CDR2 of the Heavy Chain of H5S14-27AH as described in Table 2.
IRNKPYNYET

SEQ ID NO: 556 - protein, 7 aa, Artificial Sequence
  CDR2 of the Heavy Chain of H5S14-5AH as described in Table 2.
IVYSGST

SEQ ID NO: 557 - protein, 8 aa, Artificial Sequence
  CDR2 of the Heavy Chain of Consensus Cluster #16 as described in Table 2.
  misc_feature (2)..(2): Xaa is Alanine or Aspartate
  misc_feature (3)..(3): Xaa is Tyrosine or Proline
  misc_feature (4)..(4): Xaa is Serine or Alanine
  misc_feature (5)..(5): Xaa is no amino acid or Asparagine
  misc_feature (7)..(7): Xaa is Glycine or Asparagine
IXXXXGXT

SEQ ID NO: 558 - protein, 7 aa, Artificial Sequence
  CDR2 of the Heavy Chain of H5S19-1AH as described in Table 2.
IAYSGGT

SEQ ID NO: 559 - protein, 8 aa, Artificial Sequence
  CDR2 of the Heavy Chain of Consensus Cluster #2 as described in Table 2.
IYPGNSDT

SEQ ID NO: 560 - protein, 8 aa, Artificial Sequence
  CDR2 of the Heavy Chain of Consensus Cluster #3 as described in Table 2.
ISPGNSET

SEQ ID NO: 561 - protein, 38 aa, Artificial Sequence
  Framework Region 3 of the Heavy Chain of Consensus Cluster #11 as described in Table 2.
  misc_feature (1)..(1): Xaa is Lysine, Asparagine, Isoleucine or Methionine
  misc_feature (5)..(5): Xaa is Asparagine or Lysine
  misc_feature (7)..(7): Xaa is Lysine or Arginine
  misc_feature (11)..(11): Xaa is Threonine or Isoleucine
  misc_feature (13)..(13): Xaa is Threonine or Serine
  misc_feature (14)..(14): Xaa is Alanine, Valine or Isoleucine
  misc_feature (16)..(16): Xaa is Threonine or Serine
  misc_feature (18)..(18): Xaa is Serine or Alanine
  misc_feature (19)..(19): Xaa is Serine, Asparagine or Threonine
  misc_feature (23)..(23): Xaa is Methionine or Isoleucine
  misc_feature (26)..(26): Xaa is Serine, Asparagine or Glycine
  misc_feature (27)..(27): Xaa is Arginine, Serine or Glycine
  misc_feature (31)..(31): Xaa is Glutamate or Glycine
  misc_feature (34)..(34): Xaa is Glycine or Alanine
XYNEXFXGKAXLXXDXSXXTAYXQLXXLTSXDSXVYFC

SEQ ID NO: 562 - protein, 38 aa, Artificial Sequence
  Framework Region 3 of the Heavy Chain of H5S14-12AH as described in Table 2.
KYNEKFKGKATLTIDTSASTAYMQLSRLTSEDSGVYFC

SEQ ID NO: 563 - protein, 38 aa, Artificial Sequence
  Framework Region 3 of the Heavy Chain of H5S14-13AH as described in Table 2.
KYNEKFKGKATLTIDTSASTAYMQLSRLTSEDSAVYFC

SEQ ID NO: 564 - protein, 38 aa, Artificial Sequence
  Framework Region 3 of the Heavy Chain of H5S14-14AH as described in Table 2.
KYNEKFKGKATLTVDTSASTAYMQLSRLTSEDSAVYFC

SEQ ID NO: 565 - protein, 38 aa, Artificial Sequence
  Framework Region 3 of the Heavy Chain of multiple antibodies as described in Table 2.
KYNEKFKGKATLTADTSSSTAYMQLSSLTSEDSAVYFC

SEQ ID NO: 566 - protein, 38 aa, Artificial Sequence
  Framework Region 3 of the Heavy Chain of H5S15-35AH as described in Table 2.
KYNEKFKGKATLTADTSSSTAYMQLGSLTSEDSAVYFC

SEQ ID NO: 567 - protein, 38 aa, Artificial Sequence
  Framework Region 3 of the Heavy Chain of H5S20-23AH as described in Table 2.
KYNEKFKGKAILTADTSSSTAYMQLSSLTSEDSAVYFC

SEQ ID NO: 568 - protein, 38 aa, Artificial Sequence
  Framework Region 3 of the Heavy Chain of H5S20-24AH as described in Table 2.
IYNEKFKGKATLTVDSSATTAYIQLNSLTSEDSAVYFC

SEQ ID NO: 569 - protein, 38 aa, Artificial Sequence
  Framework Region 3 of the Heavy Chain of multiple antibodies as described in Table 2.
NYNEKFKGKATLTADTSSNTAYMQLSGLTSEDSAVYFC

SEQ ID NO: 570 - protein, 38 aa, Artificial Sequence
  Framework Region 3 of the Heavy Chain of multiple antibodies as described in Table 2.
IYNEKFKGKATLTVDTSSSTAYMQLSSLTSEDSAVYFC

SEQ ID NO: 571 - protein, 38 aa, Artificial Sequence
  Framework Region 3 of the Heavy Chain of H5S20-32CH as described in Table 2.
IYNEKFKGKATLTIDTSSSTAYMQLSSLTSEDSAVYFC

SEQ ID NO: 572 - protein, 38 aa, Artificial Sequence
  Framework Region 3 of the Heavy Chain of H5S20-33AH as described in Table 2.
KYNENFKGKATLTADTSSSTAYMQLSRLTSEDSGVYFC

SEQ ID NO: 573 - protein, 38 aa, Artificial Sequence
  Framework Region 3 of the Heavy Chain of multiple antibodies as described in Table 2.
KYNEKFRGKATLTADTSSSTAYMQLSSLTSEDSAVYFC

SEQ ID NO: 574 - protein, 38 aa, Artificial Sequence
  Framework Region 3 of the Heavy Chain of H5S20-43AH as described in Table 2.
IYNEKFKGKATLTVDSSATTAYMQLSSLTSEDSAVYFC

SEQ ID NO: 575 - protein, 38 aa, Artificial Sequence
  Framework Region 3 of the Heavy Chain of H5S20-50AH as described in Table 2.
KYNEKFKGKATLTADTSSNTAYMQLSSLTSEDSAVYFC

SEQ ID NO: 576 - protein, 38 aa, Artificial Sequence
  Framework Region 3 of the Heavy Chain of H5S20-60AH as described in Table 2.
KYNENFKGKATLSADTSSSTAYMQLSSLTSGDSAVYFC

SEQ ID NO: 577 - protein, 38 aa, Artificial Sequence
  Framework Region 3 of the Heavy Chain of H5S20-62AH as described in Table 2.
MYNEKFKGKATLTVDTSSSTAYMQLSSLTSEDSAVYFC

SEQ ID NO: 578 - protein, 38 aa, Artificial Sequence
  Framework Region 3 of the Heavy Chain of ITI_047H as described in Table 2.
KYNEKFKGKATLTADTSSSTAYMQLSSLTSEDSGVYFC

SEQ ID NO: 579 - protein, 38 aa, Artificial Sequence
  Framework Region 3 of the Heavy Chain of Consensus Cluster #20 as described in Table 2.
  misc_feature (1)..(1): Xaa is Phenylalanine or Tyrosine
  misc_feature (2)..(2): Xaa is Tyrosine, Serine or Phenylalanine
  misc_feature (3)..(3): Xaa is Arginine, Proline, Serine or Alanine
  misc_feature (5)..(5): Xaa is Serine, Asparagine or Threonine
  misc_feature (6)..(6): Xaa is Valine or Leucine
  misc_feature (8)..(8): Xaa is Alanine or Glycine
  misc_feature (16)..(16): Xaa is Aspartate or Asparagine
  misc_feature (17)..(17): Xaa is Valine, Alanine or Proline
  misc_feature (18)..(18): Xaa is Arginine, Glycine or Lysine
  misc_feature (19)..(19): Xaa is Aspartate or Asparagine
  misc_feature (20)..(20): Xaa is Isoleucine or Threonine
  misc_feature (21)..(21): Xaa is Leucine or Valine
  misc_feature (22)..(22): Xaa is Tyrosine or Phenylalanine
  misc_feature (26)..(26): Xaa is Serine or Threonine
  misc_feature (29)..(29): Xaa is Arginine or Lysine
  misc_feature (37)..(37): Xaa is Phenylalanine, Tyrosine or Alanine
XXXDXXKXRFTISRDXXXXXXXLQMXSLXSEDTAMYXC

SEQ ID NO: 580 - protein, 38 aa, Artificial Sequence
  Framework Region 3 of the Heavy Chain of H5S14-11AH as described in Table 2.
YSPDSLKGRFTISRDNVRNIVYLQMSSLRSEDTAMYAC

SEQ ID NO: 581 - protein, 38 aa, Artificial Sequence
  Framework Region 3 of the Heavy Chain of H5S14-8AH as described in Table 2.
YYSDSVKGRFTISRDNARNILYLQMSSLRSEDTAMYYC

SEQ ID NO: 582 - protein, 38 aa, Artificial Sequence
  Framework Region 3 of the Heavy Chain of H5S15-10AH as described in Table 2.
YFADTVKGRFTISRDNPKNTLFLQMTSLRSEDTAMYYC

SEQ ID NO: 583 - protein, 38 aa, Artificial Sequence
  Framework Region 3 of the Heavy Chain of multiple antibodies as described in Table 2.
YYADTVKGRFTISRDNPKNTLFLQMTSLRSEDTAMYYC

SEQ ID NO: 584 - protein, 38 aa, Artificial Sequence
  Framework Region 3 of the Heavy Chain of multiple antibodies as described in Table 2.
FYPDSVKGRFTISRDNVRDILYLQMSSLRSEDTAMYFC

SEQ ID NO: 585 - protein, 38 aa, Artificial Sequence
  Framework Region 3 of the Heavy Chain of multiple antibodies as described in Table 2.
FYPDSVKGRFTISRDDVRDILYLQMSSLRSEDTAMYFC

SEQ ID NO: 586 - protein, 38 aa, Artificial Sequence
  Framework Region 3 of the Heavy Chain of multiple antibodies as described in Table 2.
YYPDSVKGRFTISRDNVRNILYLQMSSLRSEDTAMYFC

SEQ ID NO: 587 - protein, 38 aa, Artificial Sequence
  Framework Region 3 of the Heavy Chain of H5S20-14BH as described in Table 2.
YYPDSVKGRFTISRDDVRNILYLQMSSLRSEDTAMYFC

SEQ ID NO: 588 - protein, 38 aa, Artificial Sequence
  Framework Region 3 of the Heavy Chain of H5S20-14CH as described in Table 2.
YYPDSVKGRFTISRDNVRDILYLQMSSLKSEDTAMYFC

SEQ ID NO: 589 - protein, 38 aa, Artificial Sequence
  Framework Region 3 of the Heavy Chain of H5S20-1AH as described in Table 2.
FYRDSVKARFTISRDDVRDILYLQMSSLRSEDTAMYFC

SEQ ID NO: 590 - protein, 38 aa, Artificial Sequence
  Framework Region 3 of the Heavy Chain of H5S20-6AH as described in Table 2.
YYPDNVKGRFTISRDNAGNILYLQMSSLRSEDTAMYYC

SEQ ID NO: 591 - protein, 38 aa, Artificial Sequence
  Framework Region 3 of the Heavy Chain of Consensus Cluster #5 as described in Table 2.
  misc_feature (1)..(1): Xaa is Asparagine or Serine
  misc_feature (11)..(11): Xaa is Serine, Asparagine or Threonine
  misc_feature (13)..(13): Xaa is Serine, Asparagine, Threonine or Isoleucine
  misc_feature (14)..(14): Xaa is Lysine, Asparagine, Glutamine, Isoleucine, Threonine or Serine
  misc_feature (17)..(17): Xaa is Serine or Phenylalanine
  misc_feature (18)..(18): Xaa is Lysine or Arginine
  misc_feature (30)..(30): Xaa is Serine or Threonine
  misc_feature (31)..(31): Xaa is Aspartate or Glycine
  misc_feature (35)..(35): Xaa is Methionine or Isoleucine
XYNSALMSRLXIXXDNXXSQVFLKMNSLQXXDTAXYYC

SEQ ID NO: 592 - protein, 38 aa, Artificial Sequence
  Framework Region 3 of the Heavy Chain of H5S19-12BH as described in Table 2.
NYNSALMSRLTISNDNSRSQVFLKMNSLQTDDTAMYYC

SEQ ID NO: 593 - protein, 38 aa, Artificial Sequence
  Framework Region 3 of the Heavy Chain of multiple antibodies as described in Table 2.
NYNSALMSRLSISNDNSRSQVFLKMNSLQTDDTAMYYC

SEQ ID NO: 594 - protein, 38 aa, Artificial Sequence
  Framework Region 3 of the Heavy Chain of H5S19-14BH as described in Table 2.
NYNSALMSRLSINNDNSRSQVFLKMNSLQTDDTAMYYC

SEQ ID NO: 595 - protein, 38 aa, Artificial Sequence
  Framework Region 3 of the Heavy Chain of multiple antibodies as described in Table 2.
NYNSALMSRLSISKDNSKSQVFLKMNSLQTGDTAMYYC

SEQ ID NO: 596 - protein, 38 aa, Artificial Sequence
  Framework Region 3 of the Heavy Chain of H5S19-18AH as described in Table 2.
NYNSALMSRLSISKDNSKSQVFLKMNSLQSDDTAMYYC

SEQ ID NO: 597 - protein, 38 aa, Artificial Sequence
  Framework Region 3 of the Heavy Chain of multiple antibodies as described in Table 2.
NYNSALMSRLSISKDNSKSQVFLKMNSLQTDDTAMYYC

SEQ ID NO: 598 - protein, 38 aa, Artificial Sequence
  Framework Region 3 of the Heavy Chain of H5S19-20BH as described in Table 2.
NYNSALMSRLSIIQDNSKSQVFLKMNSLQTDDTAMYYC

SEQ ID NO: 599 - protein, 38 aa, Artificial Sequence
  Framework Region 3 of the Heavy Chain of H5S19-21AH as described in Table 2.
NYNSALMSRLSISTDNSRSQVFLKMNSLQTDDTAMYYC

SEQ ID NO: 600 - protein, 38 aa, Artificial Sequence
  Framework Region 3 of the Heavy Chain of H5S19-27AH as described in Table 2.
SYNSALMSRLSISSDNSRSQVFLKMNSLQTDDTAMYYC

SEQ ID NO: 601 - protein, 38 aa, Artificial Sequence
  Framework Region 3 of the Heavy Chain of multiple antibodies as described in Table 2.
NYNSALMSRLSISKDNFKSQVFLKMNSLQTDDTAIYYC

SEQ ID NO: 602 - protein, 38 aa, Artificial Sequence
  Framework Region 3 of the Heavy Chain of ITI_146H as described in Table 2.
NYNSALMSRLNISKDNSKSQVFLKMNSLQSDDTAMYYC

SEQ ID NO: 603 - protein, 38 aa, Artificial Sequence
  Framework Region 3 of the Heavy Chain of ITI_162H as described in Table 2.
NYNSALMSRLSINIDNSKSQVFLKMNSLQTDDTAMYYC

SEQ ID NO: 604 - protein, 38 aa, Artificial Sequence
  Framework Region 3 of the Heavy Chain of multiple antibodies as described in Table 2.
NYNSALMSRLNINKDNSKSQVFLKMNSLQTGDTAMYYC

SEQ ID NO: 605 - protein, 38 aa, Artificial Sequence
  Framework Region 3 of the Heavy Chain of ITI_165H as described in Table 2.
NYNSALMSRLSITKDNSKSQVFLKMNSLQTDDTAMYYC

SEQ ID NO: 606 - protein, 38 aa, Artificial Sequence
  Framework Region 3 of the Heavy Chain of Consensus Cluster #23 as described in Table 2.
  misc_feature (1)..(1): Xaa is Lysine, Glutamate, Glycine, Tyrosine, Asparagine, Aspartate, Histidine or Serine
  misc_feature (2)..(2): Xaa is Tyrosine or Phenylalanine
  misc_feature (3)..(3): Xaa is Aspartate, Asparagine, Serine or Proline
  misc_feature (4)..(4): Xaa is Proline, Glutamate, Valine, Aspartate, Alanine or Glutamine
  misc_feature (5)..(5): Xaa is Lysine, Serine, Threonine or Alanine
  misc_feature (6)..(6): Xaa is Phenylalanine, Valine or Leucine
  misc_feature (7)..(7): Xaa is Glutamine, Lysine, Threonine or Isoleucine
  misc_feature (8)..(8): Xaa is Glycine, Serine, Cysteine or Aspartate
  misc_feature (9)..(9): Xaa is Lysine or Arginine
  misc_feature (10)..(10): Xaa is Alanine, Phenylalanine, Isoleucine or Leucine
  misc_feature (11)..(11): Xaa is Threonine, Serine or Lysine
  misc_feature (12)..(12): Xaa is Isoleucine, Leucine or Phenylalanine
  misc_feature (13)..(13): Xaa is Methionine, Threonine or Serine
  misc_feature (14)..(14): Xaa is Alanine, Serine, Arginine, Lysine or Valine
  misc_feature (15)..(15): Xaa is Aspartate or Glutamate
  misc_feature (16)..(16): Xaa is Threonine, Lysine, Asparagine or Serine
  misc_feature (17)..(17): Xaa is Serine or Alanine
  misc_feature (18)..(18): Xaa is Serine, Glutamine or Lysine
  misc_feature (19)..(19): Xaa is Asparagine or Serine
  misc_feature (20)..(20): Xaa is Threonine, Isoleucine or Glutamine
  misc_feature (21)..(21): Xaa is Alanine, Leucine, Phenylalanine or Valine
  misc_feature (22)..(22): Xaa is Tyrosine or Phenylalanine
  misc_feature (23)..(23): Xaa is Leucine, Methionine, Phenylalanine or Isoleucine
  misc_feature (24)..(24): Xaa is Glutamine, Glutamate or Lysine
  misc_feature (25)..(25): Xaa is Leucine or Methionine
  misc_feature (26)..(26): Xaa is Serine or Asparagine
  misc_feature (27)..(27): Xaa is Serine, Threonine or Arginine
  misc_feature (28)..(28): Xaa is Leucine or Valine
  misc_feature (29)..(29): Xaa is Threonine, Arginine or Glutamine
  misc_feature (30)..(30): Xaa is Serine, Valine, Alanine or Threonine
  misc_feature (31)..(31): Xaa is Glutamate or Aspartate
  misc_feature (33)..(33): Xaa is Threonine or Serine
  misc_feature (35)..(35): Xaa is Valine, Threonine, Isoleucine or Methionine
XXXXXXXXXXXXXXXXXXXXXXXXXXXXXXXDXAXYYC

SEQ ID NO: 607 - protein, 38 aa, Artificial Sequence
  Framework Region 3 of the Heavy Chain of H5S14-15AH as described in Table 2.
DYNAAFICRLSISKDSSKSQVFFKMNSLQADDTAMYYC

SEQ ID NO: 608 - protein, 38 aa, Artificial Sequence
  Framework Region 3 of the Heavy Chain of multiple antibodies as described in Table 2.
NYNEKFKGKATLTADTSSSTAYMQLSSLTSEDSAIYYC

SEQ ID NO: 609 - protein, 38 aa, Artificial Sequence
  Framework Region 3 of the Heavy Chain of multiple antibodies as described in Table 2.
KYNEKFKGKAKLTVEKSSSTVYLELSRLTSDDSAVYYC

SEQ ID NO: 610 - protein, 38 aa, Artificial Sequence
  Framework Region 3 of the Heavy Chain of H5S14-6AH as described in Table 2.
EYSVSVKGRFTISRDNSQSILYLQMNTLRVEDSATYYC

SEQ ID NO: 611 - protein, 38 aa, Artificial Sequence
  Framework Region 3 of the Heavy Chain of multiple antibodies as described in Table 2.
KFDPKFQGKATITADTSSNTAYLQLSSLTSEDTAVYYC

SEQ ID NO: 612 - protein, 38 aa, Artificial Sequence
  Framework Region 3 of the Heavy Chain of multiple antibodies as described in Table 2.
HYNQKFKDKATLTVDKSSSTAYIQLSSLTSEDSAVYYC

SEQ ID NO: 613 - protein, 38 aa, Artificial Sequence
  Framework Region 3 of the Heavy Chain of multiple antibodies as described in Table 2.
KYNEKFKGKATLTSDKSSSTAYMELSSLTSEDSAVYYC

SEQ ID NO: 614 - protein, 38 aa, Artificial Sequence
  Framework Region 3 of the Heavy Chain of multiple antibodies as described in Table 2.
GYNPSLKSRISITRDTSKNQFFLQLNSVTSEDTATYYC

SEQ ID NO: 615 - protein, 38 aa, Artificial Sequence
  Framework Region 3 of the Heavy Chain of H5S19-25AH as described in Table 2.
NYNEKFKGKATFTADTSSNTAYMQLSSLTSEDSAVYYC

SEQ ID NO: 616 - protein, 38 aa, Artificial Sequence
  Framework Region 3 of the Heavy Chain of H5S19-6AH as described in Table 2.
YYPDTVTGRFTISRDNAKNTLYLEMSSLRSEDTAIYYC

SEQ ID NO: 617 - protein, 38 aa, Artificial Sequence
  Framework Region 3 of the Heavy Chain of multiple antibodies as described in Table 2.
KYDPKFQGKATITADTSSNTAYLQLSSLTSEDTAVYYC

SEQ ID NO: 618 - protein, 38 aa, Artificial Sequence
  Framework Region 3 of the Heavy Chain of ITI_021H as described in Table 2.
SYNPSLKSRISITRDTSKNQFFLQLNSVTTEDTATYYC

SEQ ID NO: 619 - protein, 38 aa, Artificial Sequence
  Framework Region 3 of the Heavy Chain of ITI_200H as described in Table 2.
KYDPKFQGKATIMADTSSNTAYLQLSSLTSEDTAVYYC

SEQ ID NO: 620 - protein, 38 aa, Artificial Sequence
  Framework Region 3 of the Heavy Chain of Consensus Cluster #21 as described in Table 2.
  misc_feature (1)..(1): Xaa is Histidine, Asparagine or Lysine
  misc_feature (2)..(2): Xaa is Tyrosine or Phenylalanine
  misc_feature (3)..(3): Xaa is Asparagine, Aspartate or Alanine
  misc_feature (4)..(4): Xaa is Glutamine, Glutamate or Proline
  misc_feature (7)..(7): Xaa is Lysine, Arginine or Glutamine
  misc_feature (8)..(8): Xaa is Aspartate, Glycine or Valine
  misc_feature (9)..(9): Xaa is Lysine or Arginine
  misc_feature (12)..(12): Xaa is Leucine or Isoleucine
  misc_feature (14)..(14): Xaa is Valine, Alanine or Threonine
  misc_feature (16)..(16): Xaa is Lysine, Threonine or Serine
  misc_feature (19)..(19): Xaa is Serine or Asparagine
  misc_feature (21)..(21): Xaa is Alanine or Valine
  misc_feature (23)..(23): Xaa is Isoleucine, Methionine or Leucine
  misc_feature (24)..(24): Xaa is Glutamine or Histidine
  misc_feature (27)..(27): Xaa is Serine or Arginine
  misc_feature (31)..(31): Xaa is Glutamate or Aspartate
  misc_feature (33)..(33): Xaa is Serine, Threonine, Asparagine or Alanine
  misc_feature (36)..(36): Xaa is Tyrosine or Phenylalanine
  misc_feature (37)..(37): Xaa is Tyrosine or Phenylalanine
XXXXKFXXXATXTXDXSSXTXYXXLSXLTSXDXAVXXC

SEQ ID NO: 621 - protein, 38 aa, Artificial Sequence
  Framework Region 3 of the Heavy Chain of H5S15-1AH as described in Table 2.
KYDPKFQGKATITTDTSSNTAYLHLSRLTSEDTAVYYC

SEQ ID NO: 622 - protein, 38 aa, Artificial Sequence
  Framework Region 3 of the Heavy Chain of H5S15-3AH as described in Table 2.
KYDPKFQGKATITTDTSSNTAYLQLSSLTSEDTAVYYC

SEQ ID NO: 623 - protein, 38 aa, Artificial Sequence
  Framework Region 3 of the Heavy Chain of H5S20-10AH as described in Table 2.
KYAPKFQGKATITADTSSNTVYLQLSSLTSEDTAVYYC

SEQ ID NO: 624 - protein, 38 aa, Artificial Sequence
  Framework Region 3 of the Heavy Chain of multiple antibodies as described in Table 2.
KYAPKFQGKATITADTSSNTAYLQLSSLTSEDTAVYYC

SEQ ID NO: 625 - protein, 38 aa, Artificial Sequence
  Framework Region 3 of the Heavy Chain of H5S20-17AH as described in Table 2.
KYAPKFQDKATITADTSSNTAYLQLSSLTSEDTAVYYC

SEQ ID NO: 626 - protein, 38 aa, Artificial Sequence
  Framework Region 3 of the Heavy Chain of H5S20-49AH as described in Table 2.
KYAPKFQVKATITADTSSNTAYLQLSSLTSEDNAVYYC

SEQ ID NO: 627 - protein, 38 aa, Artificial Sequence
  Framework Region 3 of the Heavy Chain of H5S20-52AH as described in Table 2.
KFAPKFQDKATITADTSSNTAYLQLSSLTSEDTAVYYC

SEQ ID NO: 628 - protein, 38 aa, Artificial Sequence
  Framework Region 3 of the Heavy Chain of H5S20-58AH as described in Table 2.
KYAPKFQDKATITADSSSNTAYLQLSSLTSEDTAVYYC

SEQ ID NO: 629 - protein, 38 aa, Artificial Sequence
  Framework Region 3 of the Heavy Chain of H5S20-9AH as described in Table 2.
KYAPKFQGRATITADTSSNTAYLHLSSLTSEDTAVYYC

SEQ ID NO: 630 - protein, 38 aa, Artificial Sequence
  Framework Region 3 of the Heavy Chain of ITI_091H as described in Table 2.
KYAPKFQGKATITADTSSNTAYLQLSSLTSEDAAVFYC

SEQ ID NO: 631 - protein, 38 aa, Artificial Sequence
  Framework Region 3 of the Heavy Chain of ITI_122H as described in Table 2.
NYNEKFRGKATLTADKSSSTAYMQLSSLTSDDSAVYFC

SEQ ID NO: 632 - protein, 38 aa, Artificial Sequence
  Framework Region 3 of the Heavy Chain of Consensus Cluster #10 as described in Table 2.
  misc_feature (1)..(1): Xaa is Lysine, Asparagine, Tyrosine, Arginine or Aspartate
  misc_feature (3)..(3): Xaa is Asparagine or Proline
  misc_feature (4)..(4): Xaa is Glutamate, Glutamine, Aspartate, Proline or Alanine
  misc_feature (5)..(5): Xaa is Lysine, Serine, Threonine, Alanine or Proline
  misc_feature (6)..(6): Xaa is Phenylalanine, Valine or Leucine
  misc_feature (7)..(7): Xaa is Lysine, Arginine or Isoleucine
  misc_feature (8)..(8): Xaa is Glycine, Aspartate or Serine
  misc_feature (9)..(9): Xaa is Lysine or Arginine
  misc_feature (10)..(10): Xaa is Alanine, Phenylalanine or Leucine
  misc_feature (11)..(11): Xaa is Threonine or Serine
  misc_feature (12)..(12): Xaa is Leucine or Isoleucine
  misc_feature (13)..(13): Xaa is Threonine or Serine
  misc_feature (14)..(14): Xaa is Serine, Valine, Alanine, Arginine or Lysine
  misc_feature (16)..(16): Xaa is Lysine, Threonine or Asparagine
  misc_feature (17)..(17): Xaa is Serine or Alanine
  misc_feature (18)..(18): Xaa is Serine, Lysine or Arginine
  misc_feature (19)..(19): Xaa is Serine or Asparagine
  misc_feature (20)..(20): Xaa is Threonine, Asparagine or Glutamine
  misc_feature (21)..(21): Xaa is Alanine, Leucine or Valine
  misc_feature (22)..(22): Xaa is Tyrosine or Phenylalanine
  misc_feature (23)..(23): Xaa is Methionine, Leucine or Phenylalanine
  misc_feature (24)..(24): Xaa is Glutamate, Arginine, Glutamine or Lysine
  misc_feature (25)..(25): Xaa is Leucine, Methionine or Isoleucine
  misc_feature (26)..(26): Xaa is Serine, Threonine or Asparagine
  misc_feature (27)..(27): Xaa is Serine or Threonine
  misc_feature (28)..(28): Xaa is Leucine, Proline or Valine
  misc_feature (29)..(29): Xaa is Threonine, Lysine, Aspartate or Glutamine
  misc_feature (30)..(30): Xaa is Serine, Threonine or Alanine
  misc_feature (31)..(31): Xaa is Glutamate, Alanine, Asparagine, Aspartate or Serine
  misc_feature (33)..(33): Xaa is Serine or Threonine
  misc_feature (35)..(35): Xaa is Valine, Methionine, Threonine or Isoleucine
  misc_feature (36)..(36): Xaa is Tyrosine or Cysteine
  misc_feature (37)..(37): Xaa is Tyrosine or Phenylalanine
XYXXXXXXXXXXXXDXXXXXXXXXXXXXXXXDXAXXXC

SEQ ID NO: 633 - protein, 38 aa, Artificial Sequence
  Framework Region 3 of the Heavy Chain of H5S14-10AH as described in Table 2.
RYNPSLKSRLTISKDTSRNQVFLKITSVDTADTATYYC

SEQ ID NO: 634 - protein, 38 aa, Artificial Sequence
  Framework Region 3 of the Heavy Chain of H5S14-16AH as described in Table 2.
YYPDSVKGRFTISRDNAKNNLYLQMSSLKSEDTAMYYC

SEQ ID NO: 635 - protein, 38 aa, Artificial Sequence
  Framework Region 3 of the Heavy Chain of H5S14-20AH as described in Table 2.
NYNQKFKDKATLTVDKSSSTAYMQLSSPTSEDSAVYYC

SEQ ID NO: 636 - protein, 38 aa, Artificial Sequence
  Framework Region 3 of the Heavy Chain of H5S14-26AH as described in Table 2.
KYNEKFKGKATLTADKSSSTAYMQLSSLTSDDSAVYFC

SEQ ID NO: 637 - protein, 38 aa, Artificial Sequence
  Framework Region 3 of the Heavy Chain of H5S14-28AH as described in Table 2.
NYNEKFKGKATLTADTSSSTAYMQLSSLTSEDSAVCFC

SEQ ID NO: 638 - protein, 38 aa, Artificial Sequence
  Framework Region 3 of the Heavy Chain of H5S15-33AH as described in Table 2.
DYNPAFISRLSISKDNSKSQVFFKMNTLQASDTAIYYC

SEQ ID NO: 639 - protein, 38 aa, Artificial Sequence
  Framework Region 3 of the Heavy Chain of multiple antibodies as described in Table 2.
YYPDTVKGRFTISRDNAKNTLYLQMSSLKSEDTAMYYC

SEQ ID NO: 640 - protein, 38 aa, Artificial Sequence
  Framework Region 3 of the Heavy Chain of multiple antibodies as described in Table 2.
DYNAAFISRLSISKDNSKSQVFFKMNSLQANDTAIYYC

SEQ ID NO: 641 - protein, 38 aa, Artificial Sequence
  Framework Region 3 of the Heavy Chain of H5S20-21AH as described in Table 2.
NYNQSFRGKATLTVDTSSSTAYMRLSSLTSEDSAVYFC

SEQ ID NO: 642 - protein, 38 aa, Artificial Sequence
  Framework Region 3 of the Heavy Chain of ITI_131H as described in Table 2.
DYNAPFISRLSISKDNSKSQVFFKMNSLQANDTAIYYC

SEQ ID NO: 643 - protein, 38 aa, Artificial Sequence
  Framework Region 3 of the Heavy Chain of ITI_180H as described in Table 2.
DYNAAFISRLSITKDKSKSQVFFKMNSLQANDTAIYYC

SEQ ID NO: 644 - protein, 38 aa, Artificial Sequence
  Framework Region 3 of the Heavy Chain of Consensus Cluster #8 as described in Table 2.
  misc_feature (3)..(3): Xaa is Aspartate or Alanine
  misc_feature (4)..(4): Xaa is Aspartate or Glutamate
  misc_feature (24)..(24): Xaa is Glutamine or Arginine
  misc_feature (33)..(33): Xaa is Threonine, Methionine or Serine
  misc_feature (35)..(35): Xaa is Threonine or Serine
TYXXDFKGRFAFSLETSASTAYLXINNLKNEDXAXYFC

SEQ ID NO: 645 - protein, 38 aa, Artificial Sequence
  Framework Region 3 of the Heavy Chain of multiple antibodies as described in Table 2.
TYADDFKGRFAFSLETSASTAYLQINNLKNEDMATYFC

SEQ ID NO: 646 - protein, 38 aa, Artificial Sequence
  Framework Region 3 of the Heavy Chain of H5S15-7AH as described in Table 2.
TYAEDFKGRFAFSLETSASTAYLQINNLKNEDMATYFC

SEQ ID NO: 647 - protein, 38 aa, Artificial Sequence
  Framework Region 3 of the Heavy Chain of multiple antibodies as described in Table 2.
TYADDFKGRFAFSLETSASTAYLRINNLKNEDTATYFC

SEQ ID NO: 648 - protein, 38 aa, Artificial Sequence
  Framework Region 3 of the Heavy Chain of H5S19-3AH as described in Table 2.
TYADDFKGRFAFSLETSASTAYLRINNLKNEDSATYFC

SEQ ID NO: 649 - protein, 38 aa, Artificial Sequence
  Framework Region 3 of the Heavy Chain of H5S19-8AH as described in Table 2.
TYADDFKGRFAFSLETSASTAYLRINNLKNEDTASYFC

SEQ ID NO: 650 - protein, 38 aa, Artificial Sequence
  Framework Region 3 of the Heavy Chain of multiple antibodies as described in Table 2.
TYADDFKGRFAFSLETSASTAYLQINNLKNEDTATYFC

SEQ ID NO: 651 - protein, 38 aa, Artificial Sequence
  Framework Region 3 of the Heavy Chain of ITI_083H as described in Table 2.
TYDDDFKGRFAFSLETSASTAYLQINNLKNEDTATYFC

SEQ ID NO: 652 - protein, 38 aa, Artificial Sequence
  Framework Region 3 of the Heavy Chain of Consensus Cluster #15 as described in Table 2.
  misc_feature (1)..(1): Xaa is Tyrosine, Serine, Asparagine or Aspartate
  misc_feature (2)..(2): Xaa is Tyrosine or Cysteine
  misc_feature (3)..(3): Xaa is Proline, Asparagine or Alanine
  misc_feature (4)..(4): Xaa is Aspartate, Glutamine, Glutamate or Alanine
  misc_feature (5)..(5): Xaa is Serine, Lysine, Threonine or Alanine
  misc_feature (6)..(6): Xaa is Valine or Phenylalanine
  misc_feature (7)..(7): Xaa is Lysine, Methionine or Threonine
  misc_feature (8)..(8): Xaa is Glycine, Serine or Aspartate
  misc_feature (9)..(9): Xaa is Arginine or Lysine
  misc_feature (10)..(10): Xaa is Phenylalanine, Alanine or Leucine
  misc_feature (11)..(11): Xaa is Threonine or Serine
  misc_feature (12)..(12): Xaa is Isoleucine, Phenylalanine or Leucine
  misc_feature (13)..(13): Xaa is Serine or Threonine
  misc_feature (14)..(14): Xaa is Arginine, Valine, Serine or Lysine
  misc_feature (16)..(16): Xaa is Asparagine, Threonine, Lysine or Aspartate
  misc_feature (17)..(17): Xaa is Alanine or Serine
  misc_feature (18)..(18): Xaa is Lysine, Serine, Arginine or Glutamine
  misc_feature (19)..(19): Xaa is Asparagine or Serine
  misc_feature (20)..(20): Xaa is Threonine, Isoleucine, Glutamine or Methionine
  misc_feature (21)..(21): Xaa is Leucine, Alanine or Valine
  misc_feature (22)..(22): Xaa is Tyrosine or Phenylalanine
  misc_feature (23)..(23): Xaa is Leucine, Methionine or Phenylalanine
  misc_feature (24)..(24): Xaa is Glutamine, Glutamate, Aspartate or Lysine
  misc_feature (25)..(25): Xaa is Methionine, Phenylalanine or Leucine
  misc_feature (26)..(26): Xaa is Serine or Asparagine
  misc_feature (27)..(27): Xaa is Serine, Arginine or Asparagine
  misc_feature (29)..(29): Xaa is Lysine, Threonine, Arginine or Glutamine
  misc_feature (30)..(30): Xaa is Serine, Alanine or Threonine
  misc_feature (31)..(31): Xaa is Glutamate or Aspartate
  misc_feature (33)..(33): Xaa is Threonine or Serine
  misc_feature (35)..(35): Xaa is Methionine, Valine or Isoleucine
XXXXXXXXXXXXXXDXXXXXXXXXXXXLXXXDXAXYYC

SEQ ID NO: 653 - protein, 38 aa, Artificial Sequence
  Framework Region 3 of the Heavy Chain of H5S14-18AH as described in Table 2.
YYADSVKDRFTISRDDSQSMLYLQMNNLKTEDTAMYYC

SEQ ID NO: 654 - protein, 38 aa, Artificial Sequence
  Framework Region 3 of the Heavy Chain of H5S14-23AH as described in Table 2.
SYNQKFKGKATFTVDTSSSTAYMQFNSLTSEDSAVYYC

SEQ ID NO: 655 - protein, 38 aa, Artificial Sequence
  Framework Region 3 of the Heavy Chain of multiple antibodies as described in Table 2.
YYPDSVKGRFTISRDNAKNTLYLQMSSLKSEDTAMYYC

SEQ ID NO: 656 - protein, 38 aa, Artificial Sequence
  Framework Region 3 of the Heavy Chain of H5S15-14AH as described in Table 2.
NCNEKFKGKATLTSDKSSSTAYMELSRLTSEDSAVYYC

SEQ ID NO: 657 - protein, 38 aa, Artificial Sequence
  Framework Region 3 of the Heavy Chain of H5S15-25AH as described in Table 2.
NCNEKFKGKATLTSDKSSSTAYMELSSLTSEDSAVYYC

SEQ ID NO: 658 - protein, 38 aa, Artificial Sequence
  Framework Region 3 of the Heavy Chain of H5S15-5AH as described in Table 2.
NCNEKFKGKATLTSDKSSSTAYMDLSSLTSEDSAVYYC

SEQ ID NO: 659 - protein, 38 aa, Artificial Sequence
  Framework Region 3 of the Heavy Chain of multiple antibodies as described in Table 2.
DYNAAFMSRLSITKDNSKSQVFFKMNSLQADDTAIYYC

SEQ ID NO: 660 - protein, 38 aa, Artificial Sequence
  Framework Region 3 of the Heavy Chain of H5S20-53AH as described in Table 2.
YYPDTVTGRFTISRDNAKNTLYLEMSSLRSEDTAMYYC

SEQ ID NO: 661 - protein, 38 aa, Artificial Sequence
  Framework Region 3 of the Heavy Chain of H5S20-59AH as described in Table 2.
YYPDSVKGRFTISRDNARNILYLQMSSLRSEDTAMYYC

SEQ ID NO: 662 - protein, 38 aa, Artificial Sequence
  Framework Region 3 of the Heavy Chain of Consensus Cluster #19 as described in Table 2.
  misc_feature (1)..(1): Xaa is Aspartate or Threonine
  misc_feature (3)..(3): Xaa is Asparagine or Alanine
  misc_feature (4)..(4): Xaa is Serine, Aspartate or Glycine
  misc_feature (5)..(5): Xaa is Alanine or Aspartate
  misc_feature (6)..(6): Xaa is Leucine or Phenylalanine
  misc_feature (8)..(8): Xaa is Serine or Glycine
  misc_feature (10)..(10): Xaa is Leucine or Phenylalanine
  misc_feature (11)..(11): Xaa is Serine or Alanine
  misc_feature (12)..(12): Xaa is Isoleucine or Phenylalanine
  misc_feature (14)..(14): Xaa is Lysine or Leucine
  misc_feature (15)..(15): Xaa is Aspartate or Glutamate
  misc_feature (16)..(16): Xaa is Asparagine or Threonine
  misc_feature (18)..(18): Xaa is Lysine or Alanine
  misc_feature (20)..(20): Xaa is Glutamine or Threonine
  misc_feature (21)..(21): Xaa is Valine, Isoleucine or Alanine
  misc_feature (22)..(22): Xaa is Phenylalanine or Tyrosine
  misc_feature (24)..(24): Xaa is Lysine or Glutamine
  misc_feature (25)..(25): Xaa is Methionine or Isoleucine
  misc_feature (27)..(27): Xaa is Serine or Asparagine
  misc_feature (28)..(28): Xaa is Leucine or Valine
  misc_feature (29)..(29): Xaa is Glutamine or Lysine
  misc_feature (30)..(30): Xaa is Threonine or Asparagine
  misc_feature (31)..(31): Xaa is Aspartate or Glutamate
  misc_feature (33)..(33): Xaa is Threonine or Methionine
  misc_feature (35)..(35): Xaa is Arginine or Threonine
  misc_feature (37)..(37): Xaa is Tyrosine or Phenylalanine
XYXXXXKXRXXXSXXXSXSXXXLXXNXXXXXDXAXYXC

SEQ ID NO: 663 - protein, 38 aa, Artificial Sequence
  Framework Region 3 of the Heavy Chain of multiple antibodies as described in Table 2.
DYNSALKSRLSISKDNSKSQVFLKMNSLQTDDTARYYC

SEQ ID NO: 664 - protein, 38 aa, Artificial Sequence
  Framework Region 3 of the Heavy Chain of H5S15-32AH as described in Table 2.
DYNSALKSRLSISKDNSKSQIFLKMNSVQTEDTARYYC

SEQ ID NO: 665 - protein, 38 aa, Artificial Sequence
  Framework Region 3 of the Heavy Chain of H5S20-12AH as described in Table 2.
TYADDFKGRFAFSLETSASTAYLQINNLKNDDMATYFC

SEQ ID NO: 666 - protein, 38 aa, Artificial Sequence
  Framework Region 3 of the Heavy Chain of multiple antibodies as described in Table 2.
TYAGDFKGRFAFSLETSASTAYLQINNLKNEDTATYFC

SEQ ID NO: 667 - protein, 38 aa, Artificial Sequence
  Framework Region 3 of the Heavy Chain of Consensus Cluster #14 as described in Table 2.
  misc_feature (1)..(1): Xaa is Threonine, Lysine, Aspartate or Serine
  misc_feature (3)..(3): Xaa is Alanine or Asparagine
  misc_feature (4)..(4): Xaa is Aspartate, Glutamate, Alanine or Glutamine
  misc_feature (5)..(5): Xaa is Aspartate, Lysine or Alanine
  misc_feature (7)..(7): Xaa is Lysine or Methionine
  misc_feature (8)..(8): Xaa is Glycine or Serine
  misc_feature (9)..(9): Xaa is Arginine or Lysine
  misc_feature (10)..(10): Xaa is Leucine, Alanine or Phenylalanine
  misc_feature (11)..(11): Xaa is Alanine, Lysine, Serine or Threonine
  misc_feature (12)..(12): Xaa is Phenylalanine, Leucine or Isoleucine
  misc_feature (13)..(13): Xaa is Serine or Threonine
  misc_feature (14)..(14): Xaa is Leucine, Valine, Lysine or Serine
  misc_feature (15)..(15): Xaa is Glutamate or Aspartate
  misc_feature (16)..(16): Xaa is Threonine, Lysine, Asparagine or Glutamate
  misc_feature (18)..(18): Xaa is Alanine, Serine or Lysine
  misc_feature (20)..(20): Xaa is Threonine or Glutamine
  misc_feature (21)..(21): Xaa is Alanine or Valine
  misc_feature (22)..(22): Xaa is Phenylalanine or Tyrosine
  misc_feature (23)..(23): Xaa is Leucine, Phenylalanine or Methionine
  misc_feature (24)..(24): Xaa is Glutamine, Glutamate or Lysine
  misc_feature (25)..(25): Xaa is Isoleucine, Leucine or Methionine
  misc_feature (26)..(26): Xaa is Asparagine or Serine
  misc_feature (27)..(27): Xaa is Asparagine, Arginine or Serine
  misc_feature (29)..(29): Xaa is Lysine, Threonine or Glutamine
  misc_feature (30)..(30): Xaa is Asparagine, Serine or Alanine
  misc_feature (31)..(31): Xaa is Glutamate or Aspartate
  misc_feature (33)..(33): Xaa is Threonine or Serine
  misc_feature (35)..(35): Xaa is Threonine, Valine or Isoleucine
  misc_feature (37)..(37): Xaa is Phenylalanine or Tyrosine
XYXXXFXXXXXXXXXXSXSXXXXXXXXLXXXDXAXYXC

SEQ ID NO: 668 - protein, 38 aa, Artificial Sequence
  Framework Region 3 of the Heavy Chain of H5S15-39AH as described in Table 2.
TYADDFKGRLAFSLETSASTAFLQINNLKNEDTATYFC

SEQ ID NO: 669 - protein, 38 aa, Artificial Sequence
  Framework Region 3 of the Heavy Chain of ITI_238H as described in Table 2.
SYNQKFKGKATLTVDESSSTAYMQLSSLTSEDSAVYYC

SEQ ID NO: 670 - protein, 38 aa, Artificial Sequence
  Framework Region 3 of the Heavy Chain of multiple antibodies as described in Table 2.
TYADDFKGRFAFSLETSASTAYLQINNLKNDDTATYFC

SEQ ID NO: 671 - protein, 38 aa, Artificial Sequence
  Framework Region 3 of the Heavy Chain of Consensus Cluster #6 as described in Table 2.
  misc_feature (2)..(2): Xaa is Phenylalanine or Tyrosine
  misc_feature (12)..(12): Xaa is Leucine or Methionine
  misc_feature (17)..(17): Xaa is Serine or Cysteine
  misc_feature (20)..(20): Xaa is Threonine or Alanine
EXAPKFQGKATXTADTXSNXAYLQLSSLTSEDTAVYYC

SEQ ID NO: 672 - protein, 38 aa, Artificial Sequence
  Framework Region 3 of the Heavy Chain of H5S20-20AH as described in Table 2.
EYAPKFQGKATMTADTSSNAAYLQLSSLTSEDTAVYYC

SEQ ID NO: 673 - protein, 38 aa, Artificial Sequence
  Framework Region 3 of the Heavy Chain of multiple antibodies as described in Table 2.
EYAPKFQGKATMTADTSSNTAYLQLSSLTSEDTAVYYC

SEQ ID NO: 674 - protein, 38 aa, Artificial Sequence
  Framework Region 3 of the Heavy Chain of H5S20-31BH as described in Table 2.
EYAPKFQGKATMTADTCSNTAYLQLSSLTSEDTAVYYC

SEQ ID NO: 675 - protein, 38 aa, Artificial Sequence
  Framework Region 3 of the Heavy Chain of H5S20-45AH as described in Table 2.
EFAPKFQGKATLTADTSSNTAYLQLSSLTSEDTAVYYC

SEQ ID NO: 676 - protein, 38 aa, Artificial Sequence
  Framework Region 3 of the Heavy Chain of Consensus Cluster #12 as described in Table 2.
  misc_feature (1)..(1): Xaa is Phenylalanine, Aspartate or Asparagine
  misc_feature (3)..(3): Xaa is Proline, Asparagine or Tyrosine
  misc_feature (4)..(4): Xaa is Aspartate, Serine or Glutamate
  misc_feature (5)..(5): Xaa is Serine, Alanine or Lysine
  misc_feature (6)..(6): Xaa is Valine, Leucine or Phenylalanine
  misc_feature (8)..(8): Xaa is Glycine, Serine or Valine
  misc_feature (9)..(9): Xaa is Arginine or Lysine
  misc_feature (10)..(10): Xaa is Phenylalanine, Leucine or Alanine
  misc_feature (11)..(11): Xaa is Threonine or Serine
  misc_feature (12)..(12): Xaa is Isoleucine or Leucine
  misc_feature (13)..(13): Xaa is Serine or Threonine
  misc_feature (14)..(14): Xaa is Arginine, Lysine or Alanine
  misc_feature (16)..(16): Xaa is Asparagine or Threonine
  misc_feature (17)..(17): Xaa is Alanine or Serine
  misc_feature (18)..(18): Xaa is Lysine or Serine
  misc_feature (19)..(19): Xaa is Asparagine or Serine
  misc_feature (20)..(20): Xaa is Asparagine, Glutamine or Threonine
  misc_feature (21)..(21): Xaa is Leucine, Valine or Alanine
  misc_feature (22)..(22): Xaa is Tyrosine or Phenylalanine
  misc_feature (23)..(23): Xaa is Leucine or Methionine
  misc_feature (24)..(24): Xaa is Glutamine or Lysine
  misc_feature (25)..(25): Xaa is Valine, Methionine or Leucine
  misc_feature (26)..(26): Xaa is Serine or Asparagine
  misc_feature (27)..(27): Xaa is Serine or Arginine
  misc_feature (29)..(29): Xaa is Arginine, Glutamine or Threonine
  misc_feature (30)..(30): Xaa is Serine or Threonine
  misc_feature (31)..(31): Xaa is Glutamate or Aspartate
  misc_feature (33)..(33): Xaa is Threonine or Serine
  misc_feature (35)..(35): Xaa is Leucine, Arginine or Isoleucine
XYXXXXKXXXXXXXDXXXXXXXXXXXXLXXXDXAXYYC

SEQ ID NO: 677 - protein, 38 aa, Artificial Sequence
  Framework Region 3 of the Heavy Chain of H5S15-18AH as described in Table 2.
NYYEKFKVKATLTADTSSSTAYMQLSSLTSEDSAIYYC

SEQ ID NO: 678 - protein, 38 aa, Artificial Sequence
  Framework Region 3 of the Heavy Chain of H5S15-8AH as described in Table 2.
NYNEKFKGKATLTADTSSSTAYMQLSRLTSEDSAIYYC

SEQ ID NO: 679 - protein, 38 aa, Artificial Sequence
  Framework Region 3 of the Heavy Chain of H5S20-56AH as described in Table 2.
FYPDSVKGRFTISRDNAKNNLYLQVSSLRSEDTALYYC

SEQ ID NO: 680 - protein, 38 aa, Artificial Sequence
  Framework Region 3 of the Heavy Chain of Consensus Cluster #4 as described in Table 2.
  misc_feature (8)..(8): Xaa is Glycine or Aspartate
INNQKFKXKATLTVDMSSSTAYMELRSLTSEDSAVYYC

SEQ ID NO: 681 - protein, 38 aa, Artificial Sequence
  Framework Region 3 of the Heavy Chain of H5S14-24AH as described in Table 2.
INNQKFKDKATLTVDMSSSTAYMELRSLTSEDSAVYYC

SEQ ID NO: 682 - protein, 38 aa, Artificial Sequence
  Framework Region 3 of the Heavy Chain of multiple antibodies as described in Table 2.
INNQKFKGKATLTVDMSSSTAYMELRSLTSEDSAVYYC

SEQ ID NO: 683 - protein, 38 aa, Artificial Sequence
  Framework Region 3 of the Heavy Chain of Consensus Cluster #9 as described in Table 2.
  misc_feature (1)..(1): Xaa is Lysine, Arginine or Asparagine
  misc_feature (3)..(3): Xaa is Aspartate, Alanine or Asparagine
  misc_feature (4)..(4): Xaa is Proline or Glutamate
  misc_feature (7)..(7): Xaa is Glutamine or Lysine
  misc_feature (8)..(8): Xaa is Glycine, Aspartate or Serine
  misc_feature (12)..(12): Xaa is Isoleucine or Leucine
  misc_feature (14)..(14): Xaa is Alanine or Valine
  misc_feature (16)..(16): Xaa is Threonine or Lysine
  misc_feature (19)..(19): Xaa is Asparagine, Threonine or Serine
  misc_feature (21)..(21): Xaa is Alanine or Valine
  misc_feature (23)..(23): Xaa is Leucine or Methionine
  misc_feature (24)..(24): Xaa is Glutamine or Aspartate
  misc_feature (27)..(27): Xaa is Serine or Arginine
  misc_feature (33)..(33): Xaa is Threonine or Serine
  misc_feature (37)..(37): Xaa is Tyrosine or Phenylalanine
XYXXKFXXKATXTXDXSSXTXYXXLSXLTSEDXAVYXC

SEQ ID NO: 684 - protein, 38 aa, Artificial Sequence
  Framework Region 3 of the Heavy Chain of H5S14-2AH as described in Table 2.
NYNEKFKSKATLTVDTSSSTAYMQLSSLTSEDSAVYYC

SEQ ID NO: 685 - protein, 38 aa, Artificial Sequence
  Framework Region 3 of the Heavy Chain of ITI_237H as described in Table 2.
RYNEKFKDKATLTADKSSTTVYMDLSRLTSEDSAVYFC

SEQ ID NO: 686 - protein, 38 aa, Artificial Sequence
  Framework Region 3 of the Heavy Chain of Consensus Cluster #17 as described in Table 2.
  misc_feature (20)..(20): Xaa is Threonine or Serine
  misc_feature (26)..(26): Xaa is Asparagine or Serine
  misc_feature (29)..(29): Xaa is Lysine or Threonine
  misc_feature (30)..(30): Xaa is Asparagine or Threonine
  misc_feature (31)..(31): Xaa is Aspartate or Glutamate
  misc_feature (33)..(33): Xaa is Threonine or Methionine
TYADDFKGRFAFSLETSASXAYLQIXNLXXXDXATYFC

SEQ ID NO: 687 - protein, 38 aa, Artificial Sequence
  Framework Region 3 of the Heavy Chain of H5S20-26AH as described in Table 2.
TYADDFKGRFAFSLETSASSAYLQINNLKNEDMATYFC

SEQ ID NO: 688 - protein, 38 aa, Artificial Sequence
  Framework Region 3 of the Heavy Chain of ITI_127H as described in Table 2.
TYADDFKGRFAFSLETSASSAYLQISNLTTEDMATYFC

SEQ ID NO: 689 - protein, 38 aa, Artificial Sequence
  Framework Region 3 of the Heavy Chain of ITI_128H as described in Table 2.
TYADDFKGRFAFSLETSASTAYLQINNLKTEDMATYFC

SEQ ID NO: 690 - protein, 38 aa, Artificial Sequence
  Framework Region 3 of the Heavy Chain of Consensus Cluster #7 as described in Table 2.
  misc_feature (1)..(1): Xaa is Lysine or Aspartate
  misc_feature (4)..(4): Xaa is Glutamate or Alanine
  misc_feature (5)..(5): Xaa is Lysine or Alanine
  misc_feature (7)..(7): Xaa is Lysine or Isoleucine
  misc_feature (8)..(8): Xaa is Glycine or Serine
  misc_feature (9)..(9): Xaa is Lysine or Arginine
  misc_feature (10)..(10): Xaa is Alanine or Leucine
  misc_feature (11)..(11): Xaa is Threonine or Serine
  misc_feature (12)..(12): Xaa is Leucine or Isoleucine
  misc_feature (13)..(13): Xaa is Threonine or Serine
  misc_feature (14)..(14): Xaa is Alanine or Lysine
  misc_feature (16)..(16): Xaa is Threonine or Asparagine
  misc_feature (18)..(18): Xaa is Serine or Lysine
  misc_feature (20)..(20): Xaa is Threonine or Glutamine
  misc_feature (21)..(21): Xaa is Alanine or Valine
  misc_feature (22)..(22): Xaa is Tyrosine or Phenylalanine
  misc_feature (23)..(23): Xaa is Methionine or Phenylalanine
  misc_feature (24)..(24): Xaa is Glutamine or Lysine
  misc_feature (25)..(25): Xaa is Leucine or Methionine
  misc_feature (26)..(26): Xaa is Serine or Asparagine
  misc_feature (29)..(29): Xaa is Threonine or Glutamine
  misc_feature (30)..(30): Xaa is Serine or Alanine
  misc_feature (31)..(31): Xaa is Glutamate or Aspartate
  misc_feature (33)..(33): Xaa is Serine or Threonine
XYNXXFXXXXXXXXDXSXSXXXXXXXSLXXXDXAIYYC

SEQ ID NO: 691 - protein, 38 aa, Artificial Sequence
  Framework Region 3 of the Heavy Chain of H5S15-6AH as described in Table 2.
KYNEKFKGKATLTADTSSSTAYMQLSSLTSEDSAIYYC

SEQ ID NO: 692 - protein, 38 aa, Artificial Sequence
  Framework Region 3 of the Heavy Chain of ITI_045H as described in Table 2.
DYNAAFISRLSISKDNSKSQVFFKMNSLQADDTAIYYC

SEQ ID NO: 693 - protein, 38 aa, Artificial Sequence
  Framework Region 3 of the Heavy Chain of ITI_046H as described in Table 2.
DYNAAFISRLTISKDNSKSQVFFKMNSLQADDTAIYYC

SEQ ID NO: 694 - protein, 38 aa, Artificial Sequence
  Framework Region 3 of the Heavy Chain of Consensus Cluster #13 as described in Table 2.
  misc_feature (1)..(1): Xaa is Isoleucine, Lysine or Tyrosine
  misc_feature (3)..(3): Xaa is Aspartate or Lysine
  misc_feature (4)..(4): Xaa is Proline or Glutamate
  misc_feature (7)..(7): Xaa is Glutamine or Lysine
  misc_feature (8)..(8): Xaa is Glycine or Aspartate
  misc_feature (11)..(11): Xaa is Serine, Threonine or Isoleucine
  misc_feature (12)..(12): Xaa is Isoleucine or Leucine
  misc_feature (16)..(16): Xaa is Threonine or Lysine
  misc_feature (19)..(19): Xaa is Asparagine or Serine
  misc_feature (23)..(23): Xaa is Leucine or Methionine
  misc_feature (31)..(31): Xaa is Glutamate or Aspartate
  misc_feature (33)..(33): Xaa is Threonine or Serine
  misc_feature (37)..(37): Xaa is Tyrosine or Phenylalanine
XYXXKFXXKAXXTADXSSXTAYXQLSSLTSXDXAVYXC

SEQ ID NO: 695 - protein, 38 aa, Artificial Sequence
  Framework Region 3 of the Heavy Chain of H5S15-29AH as described in Table 2.
IYDPKFQGKASITADTSSNTAYLQLSSLTSEDTAVYYC

SEQ ID NO: 696 - protein, 38 aa, Artificial Sequence
  Framework Region 3 of the Heavy Chain of H5S19-24AH as described in Table 2.
YYKEKFKDKAILTADKSSSTAYMQLSSLTSDDSAVYFC

SEQ ID NO: 697 - protein, 38 aa, Artificial Sequence
  Framework Region 3 of the Heavy Chain of Consensus Cluster #18 as described in Table 2.
  misc_feature (26)..(26): Xaa is Asparagine or Serine
  misc_feature (35)..(35): Xaa is Methionine or Isoleucine
YYPDSVKGRFTISRDNAKNTLYLQMXSLKSEDTAXYYC

SEQ ID NO: 698 - protein, 38 aa, Artificial Sequence
  Framework Region 3 of the Heavy Chain of H5S14-1AH as described in Table 2.
YYPDSVKGRFTISRDNAKNTLYLQMSSLKSEDTAIYYC

SEQ ID NO: 699 - protein, 38 aa, Artificial Sequence
  Framework Region 3 of the Heavy Chain of ITI_203H as described in Table 2.
YYPDSVKGRFTISRDNAKNTLYLQMNSLKSEDTAMYYC

SEQ ID NO: 700 - protein, 38 aa, Artificial Sequence
  Framework Region 3 of the Heavy Chain of Consensus Cluster #22 as described in Table 2.
  misc_feature (1)..(1): Xaa is Asparagine, Serine or Tyrosine
  misc_feature (3)..(3): Xaa is Aspartate, Asparagine or Serine
  misc_feature (4)..(4): Xaa is Glutamate, Proline or Aspartate
  misc_feature (5)..(5): Xaa is Lysine or Serine
  misc_feature (6)..(6): Xaa is Phenylalanine, Leucine or Valine
  misc_feature (8)..(8): Xaa is Serine or Glycine
  misc_feature (9)..(9): Xaa is Lysine or Arginine
  misc_feature (10)..(10): Xaa is Alanine, Isoleucine or Phenylalanine
  misc_feature (11)..(11): Xaa is Threonine or Serine
  misc_feature (12)..(12): Xaa is Leucine or Isoleucine
  misc_feature (13)..(13): Xaa is Threonine or Serine
  misc_feature (14)..(14): Xaa is Valine or Arginine
  misc_feature (16)..(16): Xaa is Threonine or Aspartate
  misc_feature (18)..(18): Xaa is Serine or Lysine
  misc_feature (19)..(19): Xaa is Serine or Asparagine
  misc_feature (20)..(20): Xaa is Threonine, Glutamine or Serine
  misc_feature (21)..(21): Xaa is Alanine, Phenylalanine or Valine
  misc_feature (22)..(22): Xaa is Tyrosine or Phenylalanine
  misc_feature (23)..(23): Xaa is Methionine or Leucine
  misc_feature (25)..(25): Xaa is Leucine or Methionine
  misc_feature (26)..(26): Xaa is Serine or Asparagine
  misc_feature (27)..(27): Xaa is Serine or Asparagine
  misc_feature (28)..(28): Xaa is Leucine or Valine
  misc_feature (29)..(29): Xaa is Threonine or Arginine
  misc_feature (30)..(30): Xaa is Serine or Alanine
  misc_feature (33)..(33): Xaa is Serine, Threonine or Methionine
  misc_feature (34)..(34): Xaa is Alanine or Glycine
  misc_feature (35)..(35): Xaa is Valine, Threonine or Isoleucine
  misc_feature (37)..(37): Xaa is Tyrosine or Phenylalanine
XYXXXXKXXXXXXXDXSXXXXXXQXXXXXXEDXXXYXC

SEQ ID NO: 701 - protein, 38 aa, Artificial Sequence
  Framework Region 3 of the Heavy Chain of H5S14-21AH as described in Table 2.
NYDEKFKSKATLTVDTSSSTAYMQLSSLTSEDSAVYYC

SEQ ID NO: 702 - protein, 38 aa, Artificial Sequence
  Framework Region 3 of the Heavy Chain of H5S14-27AH as described in Table 2.
YYSDSVKGRFTISRDDSKSSVYLQMNNLRAEDMGIYYC

SEQ ID NO: 703 - protein, 38 aa, Artificial Sequence
  Framework Region 3 of the Heavy Chain of H5S14-5AH as described in Table 2.
SYNPSLKSRISITRDTSKNQFFLQLNSVTAEDTATYFC

SEQ ID NO: 704 - protein, 38 aa, Artificial Sequence
  Framework Region 3 of the Heavy Chain of Consensus Cluster #16 as described in Table 2.
  misc_feature (1)..(1): Xaa is Serine or Lysine
  misc_feature (3)..(3): Xaa is Serine or Aspartate
  misc_feature (5)..(5): Xaa is Serine or Lysine
  misc_feature (6)..(6): Xaa is Leucine or Phenylalanine
  misc_feature (7)..(7): Xaa is Lysine or Glutamine
  misc_feature (8)..(8): Xaa is Serine or Aspartate
  misc_feature (9)..(9): Xaa is Arginine or Lysine
  misc_feature (10)..(10): Xaa is Isoleucine or Alanine
  misc_feature (11)..(11): Xaa is Serine or Threonine
  misc_feature (14)..(14): Xaa is Arginine or Threonine
  misc_feature (16)..(16): Xaa is Threonine or Alanine
  misc_feature (18)..(18): Xaa is Lysine or Serine
  misc_feature (20)..(20): Xaa is Glutamine or Threonine
  misc_feature (21)..(21): Xaa is Phenylalanine or Alanine
  misc_feature (22)..(22): Xaa is Phenylalanine or Tyrosine
  misc_feature (26)..(26): Xaa is Asparagine or Serine
  misc_feature (28)..(28): Xaa is Valine or Leucine
  misc_feature (30)..(30): Xaa is Threonine or Serine
  misc_feature (35)..(35): Xaa is Threonine or Valine
XYXPXXXXXXXITXDXSXNXXXLQLXSXTXEDTAXYYC

SEQ ID NO: 705 - protein, 38 aa, Artificial Sequence
  Framework Region 3 of the Heavy Chain of H5S19-1AH as described in Table 2.
SYSPSLKSRISITRDTSKNQFFLQLNSVTTEDTATYYC

SEQ ID NO: 706 - protein, 38 aa, Artificial Sequence
  Framework Region 3 of the Heavy Chain of ITI_023H as described in Table 2.
KYDPKFQDKATITTDASSNTAYLQLSSLTSEDTAVYYC

SEQ ID NO: 707 - protein, 38 aa, Artificial Sequence
  Framework Region 3 of the Heavy Chain of Consensus Cluster #2 as described in Table 2.
VFNQKFKGKAKLTAVTSATTAYMELSSLTNEDSAVYYC

SEQ ID NO: 708 - protein, 38 aa, Artificial Sequence
  Framework Region 3 of the Heavy Chain of Consensus Cluster #3 as described in Table 2.
TYNQKFTGKAKLTAVTSTSTAYMELSSLTNEDSAVYYC

SEQ ID NO: 709 - protein, 6 aa, Artificial Sequence
  CDR3 of the Heavy Chain of Consensus Cluster #11 as described in Table 2.
  misc_feature (1)..(1): Xaa is Valine, Alanine or Isoleucine
  misc_feature (4)..(4): Xaa is Valine, Methionine or Leucine
  misc_feature (5)..(5): Xaa is Alanine or Aspartate
  misc_feature (6)..(6): Xaa is Tyrosine, Asparagine, Histidine, Serine or Lysine
XGAXXX

SEQ ID NO: 710 - protein, 6 aa, Artificial Sequence
  CDR3 of the Heavy Chain of multiple antibodies as described in Table 2.
AGAMDY

SEQ ID NO: 711 - protein, 6 aa, Artificial Sequence
  CDR3 of the Heavy Chain of multiple antibodies as described in Table 2.
AGAMDS

SEQ ID NO: 712 - protein, 6 aa, Artificial Sequence
  CDR3 of the Heavy Chain of multiple antibodies as described in Table 2.
AGALDY

SEQ ID NO: 713 - protein, 6 aa, Artificial Sequence
  CDR3 of the Heavy Chain of H5S20-24AH as described in Table 2.
AGAMDH

SEQ ID NO: 714 - protein, 6 aa, Artificial Sequence
  CDR3 of the Heavy Chain of multiple antibodies as described in Table 2.
AGAMDK

SEQ ID NO: 715 - protein, 6 aa, Artificial Sequence
  CDR3 of the Heavy Chain of H5S20-33AH as described in Table 2.
VGAVAY

SEQ ID NO: 716 - protein, 6 aa, Artificial Sequence
  CDR3 of the Heavy Chain of multiple antibodies as described in Table 2.
AGAVAY

SEQ ID NO: 717 - protein, 6 aa, Artificial Sequence
  CDR3 of the Heavy Chain of H5S20-54AH as described in Table 2.
AGAMDN

SEQ ID NO: 718 - protein, 6 aa, Artificial Sequence
  CDR3 of the Heavy Chain of H5S20-57AH as described in Table 2.
IGAMDY

SEQ ID NO: 719 - protein, 6 aa, Artificial Sequence
  CDR3 of the Heavy Chain of H5S20-60AH as described in Table 2.
AGAMAY

SEQ ID NO: 720 - protein, 13 aa, Artificial Sequence
  CDR3 of the Heavy Chain of Consensus Cluster #20 as described in Table 2.
  misc_feature (1)..(1): Xaa is Threonine or Alanine
  misc_feature (4)..(4): Xaa is Glycine or Alanine
  misc_feature (5)..(5): Xaa is Tyrosine or Glycine
  misc_feature (7)..(7): Xaa is no amino acid or Asparagine
  misc_feature (8)..(8): Xaa is no amino acid, Tyrosine or Phenylalanine
  misc_feature (9)..(9): Xaa is Serine, Phenylalanine or Alanine
  misc_feature (10)..(10): Xaa is Serine or Tryptophan
  misc_feature (11)..(11): Xaa is Phenylalanine, Histidine or Tyrosine
  misc_feature (12)..(12): Xaa is Valine, Threonine, Alanine or Proline
  misc_feature (13)..(13): Xaa is Isoleucine, Tyrosine or Phenylalanine
XRGXXGXXXXXXX

SEQ ID NO: 721 - protein, 13 aa, Artificial Sequence
  CDR3 of the Heavy Chain of H5S14-11AH as described in Table 2.
ARGGGGNYFWFAY

SEQ ID NO: 722 - protein, 13 aa, Artificial Sequence
  CDR3 of the Heavy Chain of H5S14-8AH as described in Table 2.
ARGGGGNYFWFTY

SEQ ID NO: 723 - protein, 13 aa, Artificial Sequence
  CDR3 of the Heavy Chain of multiple antibodies as described in Table 2.
ARGAYGNFAWFPY

SEQ ID NO: 724 - protein, 13 aa, Artificial Sequence
  CDR3 of the Heavy Chain of H5S15-20AH as described in Table 2.
ARGAYGNFAWFAF

SEQ ID NO: 725 - protein, 11 aa, Artificial Sequence
  CDR3 of the Heavy Chain of multiple antibodies as described in Table 2.
TRGGYGSSYVI

SEQ ID NO: 726 - protein, 11 aa, Artificial Sequence
  CDR3 of the Heavy Chain of multiple antibodies as described in Table 2.
TRGGYGSSFVI

SEQ ID NO: 727 - protein, 11 aa, Artificial Sequence
  CDR3 of the Heavy Chain of multiple antibodies as described in Table 2.
TRGGYGSSHVI

SEQ ID NO: 728 - protein, 11 aa, Artificial Sequence
  CDR3 of the Heavy Chain of H5S20-6AH as described in Table 2.
ARGGYGSSYVI

SEQ ID NO: 729 - protein, 14 aa, Artificial Sequence
  CDR3 of the Heavy Chain of Consensus Cluster #5 as described in Table 2.
  misc_feature (13)..(13): Xaa is Alanine, Valine or Proline
ARDWERDSSGPFXY

SEQ ID NO: 730 - protein, 14 aa, Artificial Sequence
  CDR3 of the Heavy Chain of multiple antibodies as described in Table 2.
ARDWERDSSGPFPY

SEQ ID NO: 731 - protein, 14 aa, Artificial Sequence
  CDR3 of the Heavy Chain of multiple antibodies as described in Table 2.
ARDWERDSSGPFAY

SEQ ID NO: 732 - protein, 14 aa, Artificial Sequence
  CDR3 of the Heavy Chain of multiple antibodies as described in Table 2.
ARDWERDSSGPFVY

SEQ ID NO: 733 - protein, 11 aa, Artificial Sequence
  CDR3 of the Heavy Chain of Consensus Cluster #23 as described in Table 2.
  misc_feature (2)..(2): Xaa is Glutamine, Serine, Arginine, Isoleucine, Threonine or Glycine
  misc_feature (3)..(3): Xaa is Glycine, Serine, Arginine, Methionine, Valine, Tryptophan, Asparagine, Tyrosine, Glutamate or Cysteine
  misc_feature (4)..(4): Xaa is Glycine, no amino acid, Proline, Leucine or Tyrosine
  misc_feature (5)..(5): Xaa is Glycine, no amino acid, Leucine, Serine, Asparagine, Arginine or Tyrosine
  misc_feature (6)..(6): Xaa is no amino acid, Tryptophan or Glycine
  misc_feature (7)..(7): Xaa is Glycine, Serine, no amino acid or Asparagine
  misc_feature (8)..(8): Xaa is Alanine, Serine, no amino acid, Arginine, Leucine, Lysine, Tryptophan or Histidine
  misc_feature (9)..(9): Xaa is Methionine, Phenylalanine, Tyrosine, Proline, Isoleucine, Leucine, Valine or Tryptophan
AXXXXXXXXDY

SEQ ID NO: 734 - protein, 11 aa, Artificial Sequence
  CDR3 of the Heavy Chain of H5S14-15AH as described in Table 2.
ARNLGGSWVDY

SEQ ID NO: 735 - protein, 9 aa, Artificial Sequence
  CDR3 of the Heavy Chain of H5S14-17AH as described in Table 2.
ARNGNSLDY

SEQ ID NO: 736 - protein, 11 aa, Artificial Sequence
  CDR3 of the Heavy Chain of H5S14-25AH as described in Table 2.
ARRLYGGAMDY

SEQ ID NO: 737 - protein, 6 aa, Artificial Sequence
  CDR3 of the Heavy Chain of H5S14-6AH as described in Table 2.
ARVPDY

SEQ ID NO: 738 - protein, 10 aa, Artificial Sequence
  CDR3 of the Heavy Chain of H5S15-12AH as described in Table 2.
ASRGGSSFDY

SEQ ID NO: 739 - protein, 11 aa, Artificial Sequence
  CDR3 of the Heavy Chain of H5S15-30AH as described in Table 2.
AREYYGNHFDY

SEQ ID NO: 740 - protein, 6 aa, Artificial Sequence
  CDR3 of the Heavy Chain of H5S15-38AH as described in Table 2.
ARMYDY

SEQ ID NO: 741 - protein, 9 aa, Artificial Sequence
  CDR3 of the Heavy Chain of multiple antibodies as described in Table 2.
ARWGLRIDY

SEQ ID NO: 742 - protein, 11 aa, Artificial Sequence
  CDR3 of the Heavy Chain of H5S19-25AH as described in Table 2.
ARYPRWGKIDY

SEQ ID NO: 743 - protein, 9 aa, Artificial Sequence
  CDR3 of the Heavy Chain of H5S19-6AH as described in Table 2.
ARGGSLFDY

SEQ ID NO: 744 - protein, 10 aa, Artificial Sequence
  CDR3 of the Heavy Chain of H5S20-15AH as described in Table 2.
ATSGGSSYDY

SEQ ID NO: 745 - protein, 10 aa, Artificial Sequence
  CDR3 of the Heavy Chain of H5S20-25AH as described in Table 2.
ARSGGSSYDY

SEQ ID NO: 746 - protein, 10 aa, Artificial Sequence
  CDR3 of the Heavy Chain of H5S20-34AH as described in Table 2.
ASSGGSSFDY

SEQ ID NO: 747 - protein, 10 aa, Artificial Sequence
  CDR3 of the Heavy Chain of H5S20-42AH as described in Table 2.
AGSGGSSYDY

SEQ ID NO: 748 - protein, 10 aa, Artificial Sequence
  CDR3 of the Heavy Chain of H5S20-8AH as described in Table 2.
AISGGSSYDY

SEQ ID NO: 749 - protein, 11 aa, Artificial Sequence
  CDR3 of the Heavy Chain of ITI_021H as described in Table 2.
ARCYYGGRWDY

SEQ ID NO: 750 - protein, 10 aa, Artificial Sequence
  CDR3 of the Heavy Chain of ITI_200H as described in Table 2.
AQGGGGAMDY

SEQ ID NO: 751 - protein, 13 aa, Artificial Sequence
  CDR3 of the Heavy Chain of Consensus Cluster #21 as described in Table 2.
  misc_feature (1)..(1): Xaa is Alanine or Valine
  misc_feature (2)..(2): Xaa is Isoleucine, Arginine, Proline, Alanine, Glycine, Threonine or Asparagine
  misc_feature (3)..(3): Xaa is Tyrosine, Arginine or Proline
  misc_feature (4)..(4): Xaa is Tyrosine, Glycine or Phenylalanine
  misc_feature (5)..(5): Xaa is Serine, Histidine, Glycine, Asparagine or Alanine
  misc_feature (6)..(6): Xaa is Asparagine, Tyrosine, Serine or Arginine
  misc_feature (7)..(7): Xaa is no amino acid, Tyrosine, Threonine or Serine
  misc_feature (8)..(8): Xaa is no amino acid, Glycine, Proline, Tyrosine or Asparagine
  misc_feature (9)..(9): Xaa is Proline, Tyrosine, Alanine or Aspartate
  misc_feature (10)..(10): Xaa is Valine, Tryptophan or Glycine
  misc_feature (12)..(12): Xaa is Aspartate, Alanine or Valine
  misc_feature (13)..(13): Xaa is Tyrosine or Phenylalanine
XXXXXXXXXXFXX

SEQ ID NO: 752 - protein, 13 aa, Artificial Sequence
  CDR3 of the Heavy Chain of H5S15-11AH as described in Table 2.
ANYYASSYDWFAY

SEQ ID NO: 753 - protein, 13 aa, Artificial Sequence
  CDR3 of the Heavy Chain of H5S15-17AH as described in Table 2.
ANYYGRSNDWFVY

SEQ ID NO: 754 - protein, 13 aa, Artificial Sequence
  CDR3 of the Heavy Chain of H5S15-1AH as described in Table 2.
ANYFGNTYDWFAF

SEQ ID NO: 755 - protein, 13 aa, Artificial Sequence
  CDR3 of the Heavy Chain of H5S15-24AH as described in Table 2.
ANYYASSYDWFVY

SEQ ID NO: 756 - protein, 11 aa, Artificial Sequence
  CDR3 of the Heavy Chain of H5S15-36AH as described in Table 2.
ARPYGNYGFAY

SEQ ID NO: 757 - protein, 11 aa, Artificial Sequence
  CDR3 of the Heavy Chain of H5S15-37AH as described in Table 2.
AIYYSNPVFDY

SEQ ID NO: 758 - protein, 13 aa, Artificial Sequence
  CDR3 of the Heavy Chain of H5S15-3AH as described in Table 2.
VTYFGNTYDWFAY

SEQ ID NO: 759 - protein, 11 aa, Artificial Sequence
  CDR3 of the Heavy Chain of multiple antibodies as described in Table 2.
AGYGNSPWFAY

SEQ ID NO: 760 - protein, 12 aa, Artificial Sequence
  CDR3 of the Heavy Chain of H5S20-49AH as described in Table 2.
APYGNYPAWFAY

SEQ ID NO: 761 - protein, 11 aa, Artificial Sequence
  CDR3 of the Heavy Chain of ITI_091H as described in Table 2.
AAYGNSPWFAY

SEQ ID NO: 762 - protein, 13 aa, Artificial Sequence
  CDR3 of the Heavy Chain of ITI_122H as described in Table 2.
ARRGHNYGPWFAY

SEQ ID NO: 763 - protein, 18 aa, Artificial Sequence
  CDR3 of the Heavy Chain of Consensus Cluster #10 as described in Table 2.
  misc_feature (1)..(1): Xaa is Alanine, Serine or Threonine
  misc_feature (3)..(3): Xaa is Glycine, Arginine, Leucine, Aspartate or Serine
  misc_feature (4)..(4): Xaa is Isoleucine, Glutamate, Histidine, Valine, Leucine, Glycine, Methionine or Tyrosine
  misc_feature (5)..(5): Xaa is Isoleucine, Arginine, Tyrosine, Aspartate, Asparagine or Glycine
  misc_feature (6)..(6): Xaa is Threonine, Arginine, Glycine, no amino acid, Tyrosine, Serine or Asparagine
  misc_feature (7)..(7): Xaa is Threonine, Glycine, Asparagine, no amino acid, Serine or Lysine
  misc_feature (8)..(8): Xaa is Valine, no amino acid, Tyrosine or Proline
  misc_feature (9)..(9): Xaa is Valine, Isoleucine or no amino acid
  misc_feature (10)..(10): Xaa is Glutamate or no amino acid
  misc_feature (11)..(11): Xaa is Proline or no amino acid
  misc_feature (12)..(12): Xaa is Isoleucine, no amino acid, Aspartate or Tyrosine
  misc_feature (13)..(13): Xaa is Leucine, Isoleucine, Proline, no amino acid, Asparagine, Tyrosine or Glycine
XRXXXXXXXXXXXYAMDY

SEQ ID NO: 764 - protein, 14 aa, Artificial Sequence
  CDR3 of the Heavy Chain of H5S14-10AH as described in Table 2.
ARSMYGNYNYAMDY

SEQ ID NO: 765 - protein, 11 aa, Artificial Sequence
  CDR3 of the Heavy Chain of H5S14-16AH as described in Table 2.
ARDGNYYAMDY

SEQ ID NO: 766 - protein, 15 aa, Artificial Sequence
  CDR3 of the Heavy Chain of H5S14-20AH as described in Table 2.
TRGHYGNYDPYAMDY

SEQ ID NO: 767 - protein, 18 aa, Artificial Sequence
  CDR3 of the Heavy Chain of H5S14-22AH as described in Table 2.
ARGIITTVIEPILYAMDY

SEQ ID NO: 768 - protein, 14 aa, Artificial Sequence
  CDR3 of the Heavy Chain of H5S14-26AH as described in Table 2.
ARDYGSSYGYAMDY

SEQ ID NO: 769 - protein, 10 aa, Artificial Sequence
  CDR3 of the Heavy Chain of H5S14-28AH as described in Table 2.
ARRVDYAMDY

SEQ ID NO: 770 - protein, 18 aa, Artificial Sequence
  CDR3 of the Heavy Chain of H5S14-29AH as described in Table 2.
ARGIITTVVEPILYAMDY

SEQ ID NO: 771 - protein, 13 aa, Artificial Sequence
  CDR3 of the Heavy Chain of multiple antibodies as described in Table 2.
ARRGYNKGYAMDY

SEQ ID NO: 772 - protein, 11 aa, Artificial Sequence
  CDR3 of the Heavy Chain of H5S15-40AH as described in Table 2.
ARLLRYYAMDY

SEQ ID NO: 773 - protein, 15 aa, Artificial Sequence
  CDR3 of the Heavy Chain of multiple antibodies as described in Table 2.
ARRGYGSPYYYAMDY

SEQ ID NO: 774 - protein, 13 aa, Artificial Sequence
  CDR3 of the Heavy Chain of H5S20-21AH as described in Table 2.
SRGERRGIYAMDY

SEQ ID NO: 775 - protein, 13 aa, Artificial Sequence
  CDR3 of the Heavy Chain of ITI_130H as described in Table 2.
ARRGYGKGYAMDY

SEQ ID NO: 776 - protein, 10 aa, Artificial Sequence
  CDR3 of the Heavy Chain of Consensus Cluster #8 as described in Table 2.
  misc_feature (4)..(4): Xaa is Phenylalanine or Tyrosine
  misc_feature (5)..(5): Xaa is Threonine or Tyrosine
  misc_feature (6)..(6): Xaa is Threonine, Alanine, Glycine or Lysine
  misc_feature (7)..(7): Xaa is Alanine, Asparagine or Serine
  misc_feature (8)..(8): Xaa is Threonine, Asparagine, Tyrosine or Glutamate
  misc_feature (9)..(9): Xaa is Cysteine or Alanine
  misc_feature (10)..(10): Xaa is Tyrosine or Phenylalanine
ARSXXXXXXX

SEQ ID NO: 777 - protein, 10 aa, Artificial Sequence
  CDR3 of the Heavy Chain of multiple antibodies as described in Table 2.
ARSFYGSEAY

SEQ ID NO: 778 - protein, 10 aa, Artificial Sequence
  CDR3 of the Heavy Chain of H5S19-13AH as described in Table 2.
ARSYYANYAY

SEQ ID NO: 779 - protein, 10 aa, Artificial Sequence
  CDR3 of the Heavy Chain of multiple antibodies as described in Table 2.
ARSFYKNYAF

SEQ ID NO: 780 - protein, 10 aa, Artificial Sequence
  CDR3 of the Heavy Chain of H5S19-8AH as described in Table 2.
ARSYYANNAY

SEQ ID NO: 781 - protein, 10 aa, Artificial Sequence
  CDR3 of the Heavy Chain of ITI_035H as described in Table 2.
ARSYYGNYAY

SEQ ID NO: 782 - protein, 10 aa, Artificial Sequence
  CDR3 of the Heavy Chain of multiple antibodies as described in Table 2.
ARSFTTATCY

SEQ ID NO: 783 - protein, 16 aa, Artificial Sequence
  CDR3 of the Heavy Chain of Consensus Cluster #15 as described in Table 2.
  misc_feature (1)..(1): Xaa is Alanine or Valine
  misc_feature (2)..(2): Xaa is Arginine or Lysine
  misc_feature (3)..(3): Xaa is Glutamine, Threonine, Histidine, Alanine, Glycine, Asparagine or Glutamate
  misc_feature (4)..(4): Xaa is Glycine, Tyrosine or Arginine
  misc_feature (5)..(5): Xaa is Glycine, Tyrosine or Leucine
  misc_feature (6)..(6): Xaa is Histidine, Tyrosine or Arginine
  misc_feature (7)..(7): Xaa is Glycine or Arginine
  misc_feature (8)..(8): Xaa is no amino acid, Serine, Asparagine, Glycine or Glutamate
  misc_feature (9)..(9): Xaa is no amino acid, Serine, Threonine or Asparagine
  misc_feature (10)..(10): Xaa is Asparagine, Serine, Tyrosine, Phenylalanine, Glycine or Aspartate
  misc_feature (11)..(11): Xaa is Tyrosine, Asparagine, Valine or Leucine
  misc_feature (12)..(12): Xaa is Glycine, Tyrosine or Proline
  misc_feature (13)..(13): Xaa is Alanine, Serine or Tyrosine
  misc_feature (14)..(14): Xaa is Methionine, Leucine or Phenylalanine
XXXXXXXXXXXXXXDY

SEQ ID NO: 784 - protein, 14 aa, Artificial Sequence
  CDR3 of the Heavy Chain of H5S14-18AH as described in Table 2.
VREGGYGNYPYFDY

SEQ ID NO: 785 - protein, 15 aa, Artificial Sequence
  CDR3 of the Heavy Chain of H5S14-23AH as described in Table 2.
ARTYYYGSSYGAMDY

SEQ ID NO: 786 - protein, 14 aa, Artificial Sequence
  CDR3 of the Heavy Chain of H5S14-30AH as described in Table 2.
ARQGGHGNYGAMDY

SEQ ID NO: 787 - protein, 16 aa, Artificial Sequence
  CDR3 of the Heavy Chain of H5S15-14AH as described in Table 2.
AKARGYGSTFYYSMDY

SEQ ID NO: 788 - protein, 16 aa, Artificial Sequence
  CDR3 of the Heavy Chain of H5S15-25AH as described in Table 2.
AKARGYGGNFYYSMDY

SEQ ID NO: 789 - protein, 16 aa, Artificial Sequence
  CDR3 of the Heavy Chain of H5S15-5AH as described in Table 2.
AKARGYGGSFYYSMDY

SEQ ID NO: 790 - protein, 16 aa, Artificial Sequence
  CDR3 of the Heavy Chain of H5S20-44AH as described in Table 2.
ARHRGYGSSYNYAMDY

SEQ ID NO: 791 - protein, 15 aa, Artificial Sequence
  CDR3 of the Heavy Chain of multiple antibodies as described in Table 2.
ARHRGYGNYVYAMDY

SEQ ID NO: 792 - protein, 15 aa, Artificial Sequence
  CDR3 of the Heavy Chain of H5S20-51AH as described in Table 2.
AKNRGYGEGYYAMDY

SEQ ID NO: 793 - protein, 14 aa, Artificial Sequence
  CDR3 of the Heavy Chain of H5S20-53AH as described in Table 2.
AREGLRRDYYALDY

SEQ ID NO: 794 - protein, 15 aa, Artificial Sequence
  CDR3 of the Heavy Chain of H5S20-59AH as described in Table 2.
AKGRGYGNYLYAMDY

SEQ ID NO: 795 - protein, 13 aa, Artificial Sequence
  CDR3 of the Heavy Chain of Consensus Cluster #19 as described in Table 2.
  misc_feature (1)..(1): Xaa is Alanine or Valine
  misc_feature (3)..(3): Xaa is Aspartate or Serine
  misc_feature (4)..(4): Xaa is Asparagine, Serine, Tyrosine, Leucine or Phenylalanine
  misc_feature (6)..(6): Xaa is Histidine, Arginine or no amino acid
  misc_feature (7)..(7): Xaa is Threonine or no amino acid
  misc_feature (8)..(8): Xaa is Valine, Methionine or no amino acid
  misc_feature (9)..(9): Xaa is Valine, Threonine or Glycine
  misc_feature (11)..(11): Xaa is Glycine, Serine or Arginine
  misc_feature (12)..(12): Xaa is Aspartate or Glycine
XRXXYXXXXNXXY

SEQ ID NO: 796 - protein, 13 aa, Artificial Sequence
  CDR3 of the Heavy Chain of H5S15-19AH as described in Table 2.
ARDNYHTVVNGDY

SEQ ID NO: 797 - protein, 13 aa, Artificial Sequence
  CDR3 of the Heavy Chain of H5S15-32AH as described in Table 2.
ARDSYRTMTNGDY

SEQ ID NO: 798 - protein, 10 aa, Artificial Sequence
  CDR3 of the Heavy Chain of multiple antibodies as described in Table 2.
VRSYYGNSGY

SEQ ID NO: 799 - protein, 10 aa, Artificial Sequence
  CDR3 of the Heavy Chain of H5S20-12AH as described in Table 2.
ARSLYGNRDY

SEQ ID NO: 800 - protein, 10 aa, Artificial Sequence
  CDR3 of the Heavy Chain of H5S20-18AH as described in Table 2.
ARSFYGNRDY

SEQ ID NO: 801 - protein, 12 aa, Artificial Sequence
  CDR3 of the Heavy Chain of Consensus Cluster #14 as described in Table 2.
  misc_feature (2)..(2): Xaa is Asparagine, Arginine or Lysine
  misc_feature (3)..(3): Xaa is Tryptophan, Glycine, Threonine, Glutamate or Serine
  misc_feature (4)..(4): Xaa is Alanine, Glycine, Arginine or Leucine
  misc_feature (5)..(5): Xaa is no amino acid, Threonine, Leucine or Arginine
  misc_feature (6)..(6): Xaa is no amino acid, Arginine or Alanine
  misc_feature (7)..(7): Xaa is no amino acid or Serine
  misc_feature (8)..(8): Xaa is no amino acid, Glycine or Alanine
  misc_feature (9)..(9): Xaa is Glycine, no amino acid, Proline or Tryptophan
AXXXXXXXXFAY

SEQ ID NO: 802 - protein, 7 aa, Artificial Sequence
  CDR3 of the Heavy Chain of H5S15-13AH as described in Table 2.
AKTGFAY

SEQ ID NO: 803 - protein, 7 aa, Artificial Sequence
  CDR3 of the Heavy Chain of H5S15-28AH as described in Table 2.
ARGGFAY

SEQ ID NO: 804 - protein, 8 aa, Artificial Sequence
  CDR3 of the Heavy Chain of H5S15-39AH as described in Table 2.
ANWAGFAY

SEQ ID NO: 805 - protein, 10 aa, Artificial Sequence
  CDR3 of the Heavy Chain of ITI_236H as described in Table 2.
ARERTGPFAY

SEQ ID NO: 806 - protein, 11 aa, Artificial Sequence
  CDR3 of the Heavy Chain of ITI_238H as described in Table 2.
ARSARAAWFAY

SEQ ID NO: 807 - protein, 12 aa, Artificial Sequence
  CDR3 of the Heavy Chain of ITI_240H as described in Table 2.
ARELLRSAWFAY

SEQ ID NO: 808 - protein, 7 aa, Artificial Sequence
  CDR3 of the Heavy Chain of Consensus Cluster #6 as described in Table 2.
  misc_feature (2)..(2): Xaa is Threonine or Serine
NXRTLGY

SEQ ID NO: 809 - protein, 7 aa, Artificial Sequence
  CDR3 of the Heavy Chain of multiple antibodies as described in Table 2.
NSRTLGY

SEQ ID NO: 810 - protein, 7 aa, Artificial Sequence
  CDR3 of the Heavy Chain of H5S20-45AH as described in Table 2.
NTRTLGY

SEQ ID NO: 811 - protein, 7 aa, Artificial Sequence
  CDR3 of the Heavy Chain of Consensus Cluster #12 as described in Table 2.
  misc_feature (1)..(1): Xaa is Isoleucine or Alanine
  misc_feature (2)..(2): Xaa is Tyrosine, Arginine or Serine
  misc_feature (3)..(3): Xaa is Aspartate or Serine
  misc_feature (4)..(4): Xaa is no amino acid or Tyrosine
  misc_feature (6)..(6): Xaa is Serine or Alanine
XXXXGXY

SEQ ID NO: 812 - protein, 6 aa, Artificial Sequence
  CDR3 of the Heavy Chain of multiple antibodies as described in Table 2.
ASSGAY

SEQ ID NO: 813 - protein, 7 aa, Artificial Sequence
  CDR3 of the Heavy Chain of H5S19-4AH as described in Table 2.
ARSYGSY

SEQ ID NO: 814 - protein, 6 aa, Artificial Sequence
  CDR3 of the Heavy Chain of H5S20-56AH as described in Table 2.
IYDGSY

SEQ ID NO: 815 - protein, 13 aa, Artificial Sequence
  CDR3 of the Heavy Chain of Consensus Cluster #4 as described in Table 2.
AGSVVDRYWYFDV

SEQ ID NO: 816 - protein, 12 aa, Artificial Sequence
  CDR3 of the Heavy Chain of Consensus Cluster #9 as described in Table 2.
  misc_feature (3)..(3): Xaa is Serine or Histidine
  misc_feature (4)..(4): Xaa is Arginine, Phenylalanine, Glutamate or Glycine
  misc_feature (5)..(5): Xaa is Arginine, Glycine, Aspartate or Tyrosine
  misc_feature (6)..(6): Xaa is no amino acid or Tyrosine
  misc_feature (7)..(7): Xaa is no amino acid or Glycine
  misc_feature (8)..(8): Xaa is no amino acid, Asparagine, Glycine or Serine
  misc_feature (10)..(10): Xaa is Phenylalanine or Leucine
  misc_feature (12)..(12): Xaa is Valine or Tyrosine
ARXXXXXXYXDX

SEQ ID NO: 817 - protein, 12 aa, Artificial Sequence
  CDR3 of the Heavy Chain of H5S14-2AH as described in Table 2.
ARSGYYGSYLDY

SEQ ID NO: 818 - protein, 9 aa, Artificial Sequence
  CDR3 of the Heavy Chain of H5S15-27AH as described in Table 2.
ARSRRYFDV

SEQ ID NO: 819 - protein, 10 aa, Artificial Sequence
  CDR3 of the Heavy Chain of H5S20-22AH as described in Table 2.
ARSFGNYFDY

SEQ ID NO: 820 - protein, 10 aa, Artificial Sequence
  CDR3 of the Heavy Chain of ITI_237H as described in Table 2.
ARHEDGYLDY

SEQ ID NO: 821 - protein, 13 aa, Artificial Sequence
  CDR3 of the Heavy Chain of Consensus Cluster #17 as described in Table 2.
  misc_feature (4)..(4): Xaa is Isoleucine or Leucine
  misc_feature (5)..(5): Xaa is Asparagine or Tyrosine
  misc_feature (7)..(7): Xaa is no amino acid, Glycine or Valine
  misc_feature (8)..(8): Xaa is no amino acid, Asparagine or Aspartate
  misc_feature (9)..(9): Xaa is Aspartate or Asparagine
  misc_feature (10)..(10): Xaa is Serine or Tyrosine
  misc_feature (11)..(11): Xaa is Aspartate or Glutamate
  misc_feature (12)..(12): Xaa is Glutamate or Alanine
  misc_feature (13)..(13): Xaa is Lysine, Cysteine or Tyrosine
ARSXXYXXXXXXX

SEQ ID NO: 822 - protein, 11 aa, Artificial Sequence
  CDR3 of the Heavy Chain of H5S15-21AH as described in Table 2.
ARSINYDSDEK

SEQ ID NO: 823 - protein, 13 aa, Artificial Sequence
  CDR3 of the Heavy Chain of H5S20-26AH as described in Table 2.
ARSLYYGDNYEAY

SEQ ID NO: 824 - protein, 13 aa, Artificial Sequence
  CDR3 of the Heavy Chain of ITI_127H as described in Table 2.
ARSLYYVNNYEAY

SEQ ID NO: 825 - protein, 13 aa, Artificial Sequence
  CDR3 of the Heavy Chain of ITI_128H as described in Table 2.
ARSLYYGNNYEAC

SEQ ID NO: 826 - protein, 6 aa, Artificial Sequence
  CDR3 of the Heavy Chain of Consensus Cluster #7 as described in Table 2.
  misc_feature (3)..(3): Xaa is Glycine or Leucine
  misc_feature (4)..(4): Xaa is Arginine or no amino acid
  misc_feature (5)..(5): Xaa is Aspartate or Tyrosine
ASXXXY

SEQ ID NO: 827 - protein, 6 aa, Artificial Sequence
  CDR3 of the Heavy Chain of H5S15-6AH as described in Table 2.
ASGRDY

SEQ ID NO: 828 - protein, 5 aa, Artificial Sequence
  CDR3 of the Heavy Chain of multiple antibodies as described in Table 2.
ASLYY

SEQ ID NO: 829 - protein, 9 aa, Artificial Sequence
  CDR3 of the Heavy Chain of Consensus Cluster #13 as described in Table 2.
  misc_feature (3)..(3): Xaa is Glycine or Valine
  misc_feature (4)..(4): Xaa is Tyrosine or Aspartate
  misc_feature (5)..(5): Xaa is Serine, Tyrosine or no amino acid
  misc_feature (6)..(6): Xaa is Serine or Alanine
  misc_feature (7)..(7): Xaa is Serine or Methionine
  misc_feature (8)..(8): Xaa is Proline or Aspartate
  misc_feature (9)..(9): Xaa is Tyrosine or Phenylalanine
ARXXXXXXX

SEQ ID NO: 830 - protein, 9 aa, Artificial Sequence
  CDR3 of the Heavy Chain of H5S15-29AH as described in Table 2.
ARGYSSSPY

SEQ ID NO: 831 - protein, 9 aa, Artificial Sequence
  CDR3 of the Heavy Chain of H5S15-2AH as described in Table 2.
ARVYYAMDY

SEQ ID NO: 832 - protein, 8 aa, Artificial Sequence
  CDR3 of the Heavy Chain of H5S19-24AH as described in Table 2.
ARGDAMDF

SEQ ID NO: 833 - protein, 13 aa, Artificial Sequence
  CDR3 of the Heavy Chain of Consensus Cluster #18 as described in Table 2.
  misc_feature (3)..(3): Xaa is Histidine or Glycine
  misc_feature (4)..(4): Xaa is Glutamate, Aspartate or Glycine
  misc_feature (5)..(5): Xaa is Leucine or Aspartate
  misc_feature (6)..(6): Xaa is Glycine or no amino acid
  misc_feature (7)..(7): Xaa is Asparagine or no amino acid
  misc_feature (8)..(8): Xaa is Arginine or no amino acid
  misc_feature (9)..(9): Xaa is Serine, Tyrosine or Glycine
  misc_feature (10)..(10): Xaa is Arginine, Glycine or Leucine
  misc_feature (12)..(12): Xaa is Proline or Aspartate
TRXXXXXXXXFXY

SEQ ID NO: 834 - protein, 10 aa, Artificial Sequence
  CDR3 of the Heavy Chain of H5S14-1AH as described in Table 2.
TRGGDGLFDY

SEQ ID NO: 835 - protein, 10 aa, Artificial Sequence
  CDR3 of the Heavy Chain of H5S19-5AH as described in Table 2.
TRGDDYGFDY

SEQ ID NO: 836 - protein, 13 aa, Artificial Sequence
  CDR3 of the Heavy Chain of ITI_203H as described in Table 2.
TRHELGNRSRFPY

SEQ ID NO: 837 - protein, 7 aa, Artificial Sequence
  CDR3 of the Heavy Chain of Consensus Cluster #22 as described in Table 2.
  misc_feature (2)..(2): Xaa is Isoleucine, Arginine or Tryptophan
  misc_feature (3)..(3): Xaa is Tyrosine or Glycine
  misc_feature (4)..(4): Xaa is Aspartate or no amino acid
  misc_feature (5)..(5): Xaa is Glycine, Methionine or no amino acid
  misc_feature (6)..(6): Xaa is Tyrosine, Aspartate or Asparagine
TXXXXXY

SEQ ID NO: 838 - protein, 7 aa, Artificial Sequence
  CDR3 of the Heavy Chain of H5S14-21AH as described in Table 2.
TIYDGYY

SEQ ID NO: 839 - protein, 5 aa, Artificial Sequence
  CDR3 of the Heavy Chain of H5S14-27AH as described in Table 2.
TWGNY

SEQ ID NO: 840 - protein, 6 aa, Artificial Sequence
  CDR3 of the Heavy Chain of H5S14-5AH as described in Table 2.
TRGMDY

SEQ ID NO: 841 - protein, 13 aa, Artificial Sequence
  CDR3 of the Heavy Chain of Consensus Cluster #16 as described in Table 2.
  misc_feature (1)..(1): Xaa is Valine or Threonine
  misc_feature (2)..(2): Xaa is Tyrosine or Lysine
  misc_feature (3)..(3): Xaa is Phenylalanine or Serine
  misc_feature (4)..(4): Xaa is Lysine or Leucine
  misc_feature (5)..(5): Xaa is Tyrosine or Leucine
  misc_feature (6)..(6): Xaa is Glycine or Tryptophan
  misc_feature (7)..(7): Xaa is no amino acid or Serine
  misc_feature (8)..(8): Xaa is no amino acid or Leucine
  misc_feature (10)..(10): Xaa is Alanine or Glycine
XXXXXXXXGXFAY

SEQ ID NO: 842 - protein, 11 aa, Artificial Sequence
  CDR3 of the Heavy Chain of H5S19-1AH as described in Table 2.
VYFKYGGAFAY

SEQ ID NO: 843 - protein, 13 aa, Artificial Sequence
  CDR3 of the Heavy Chain of ITI_023H as described in Table 2.
TKSLLWSLGGFAY

SEQ ID NO: 844 - protein, 7 aa, Artificial Sequence
  CDR3 of the Heavy Chain of Consensus Cluster #1 as described in Table 2.
TSRSWVL

SEQ ID NO: 845 - protein, 14 aa, Artificial Sequence
  CDR3 of the Heavy Chain of Consensus Cluster #2 as described in Table 2.
TKEPRTIEGAWFTY

SEQ ID NO: 846 - protein, 11 aa, Artificial Sequence
  CDR3 of the Heavy Chain of Consensus Cluster #3 as described in Table 2.
TKIYYDYDDGY

SEQ ID NO: 847 - protein, 11 aa, Artificial Sequence
  Framework Region 4 of the Heavy Chain of Consensus Cluster #11 as described in Table 2.
  misc_feature (6)..(6): Xaa is Serine or Alanine
  misc_feature (8)..(8): Xaa is Threonine or Isoleucine
WGQGTXVXVSS

SEQ ID NO: 848 - protein, 11 aa, Artificial Sequence
  Framework Region 4 of the Heavy Chain of multiple antibodies as described in Table 2.
WGQGTSVTVSS

SEQ ID NO: 849 - protein, 11 aa, Artificial Sequence
  Framework Region 4 of the Heavy Chain of H5S20-41BH as described in Table 2.
WGQGTSVIVSS

SEQ ID NO: 850 - protein, 11 aa, Artificial Sequence
  Framework Region 4 of the Heavy Chain of ITI_047H as described in Table 2.
WGQGTAVTVSS

SEQ ID NO: 851 - protein, 11 aa, Artificial Sequence
  Framework Region 4 of the Heavy Chain of Consensus Cluster #20 as described in Table 2.
  misc_feature (6)..(6): Xaa is Threonine or Leucine
  misc_feature (7)..(7): Xaa is Leucine or Valine
  misc_feature (9)..(9): Xaa is Valine or Isoleucine
  misc_feature (11)..(11): Xaa is Serine, Alanine or Threonine
WGQGTXXTXSX

SEQ ID NO: 852 - protein, 11 aa, Artificial Sequence
  Framework Region 4 of the Heavy Chain of multiple antibodies as described in Table 2.
WGQGTLVTVSA

SEQ ID NO: 853 - protein, 11 aa, Artificial Sequence
  Framework Region 4 of the Heavy Chain of H5S14-8AH as described in Table 2.
WGQGTLVTISA

SEQ ID NO: 854 - protein, 11 aa, Artificial Sequence
  Framework Region 4 of the Heavy Chain of H5S15-16BH as described in Table 2.
WGQGTLVTVST

SEQ ID NO: 855 - protein, 11 aa, Artificial Sequence
  Framework Region 4 of the Heavy Chain of H5S20-11AH as described in Table 2.
WGQGTTVTVSS

SEQ ID NO: 856 - protein, 11 aa, Artificial Sequence
  Framework Region 4 of the Heavy Chain of multiple antibodies as described in Table 2.
WGQGTTLTVSS

SEQ ID NO: 857 - protein, 11 aa, Artificial Sequence
  Framework Region 4 of the Heavy Chain of Consensus Cluster #23 as described in Table 2.
  misc_feature (6)..(6): Xaa is Serine or Threonine
  misc_feature (7)..(7): Xaa is Valine or Leucine
WGQGTXXTVSS

SEQ ID NO: 858 - protein, 11 aa, Artificial Sequence
  Framework Region 4 of the Heavy Chain of Consensus Cluster #21 as described in Table 2.
  misc_feature (6)..(6): Xaa is Threonine or Leucine
  misc_feature (7)..(7): Xaa is Leucine or Valine
  misc_feature (11)..(11): Xaa is Serine or Alanine
WGQGTXXTVSX

SEQ ID NO: 859 - protein, 11 aa, Artificial Sequence
  Framework Region 4 of the Heavy Chain of Consensus Cluster #10 as described in Table 2.
  misc_feature (5)..(5): Xaa is Threonine or Serine
  misc_feature (7)..(7): Xaa is Valine or Phenylalanine
WGQGXSXTVSS

SEQ ID NO: 860 - protein, 11 aa, Artificial Sequence
  Framework Region 4 of the Heavy Chain of H5S15-33AH as described in Table 2.
WGQGTSFTVSS

SEQ ID NO: 861 - protein, 11 aa, Artificial Sequence
  Framework Region 4 of the Heavy Chain of H5S20-21AH as described in Table 2.
WGQGSSVTVSS

SEQ ID NO: 862 - protein, 11 aa, Artificial Sequence
  Framework Region 4 of the Heavy Chain of Consensus Cluster #8 as described in Table 2.
  misc_feature (4)..(4): Xaa is Glycine or Serine
  misc_feature (6)..(6): Xaa is Threonine, Leucine or Isoleucine
  misc_feature (7)..(7): Xaa is Leucine or Valine
  misc_feature (11)..(11): Xaa is Serine or Alanine
WGQXTXXTVSX

SEQ ID NO: 863 - protein, 11 aa, Artificial Sequence
  Framework Region 4 of the Heavy Chain of multiple antibodies as described in Table 2.
WGQGTILTVSS

SEQ ID NO: 864 - protein, 11 aa, Artificial Sequence
  Framework Region 4 of the Heavy Chain of ITI_032H as described in Table 2.
WGQSTILTVSS

SEQ ID NO: 865 - protein, 11 aa, Artificial Sequence
  Framework Region 4 of the Heavy Chain of Consensus Cluster #12 as described in Table 2.
  misc_feature (6)..(6): Xaa is Leucine or Threonine
  misc_feature (7)..(7): Xaa is Valine or Leucine
  misc_feature (11)..(11): Xaa is Alanine or Serine
WGQGTXXTVSX

SEQ ID NO: 866 - protein, 11 aa, Artificial Sequence
  Framework Region 4 of the Heavy Chain of Consensus Cluster #4 as described in Table 2.
WGAGTTVTVSS

SEQ ID NO: 867 - protein, 11 aa, Artificial Sequence
  Framework Region 4 of the Heavy Chain of Consensus Cluster #9 as described in Table 2.
  misc_feature (3)..(3): Xaa is Alanine or Glutamine
  misc_feature (7)..(7): Xaa is Valine or Leucine
WGXGTTXTVSS

SEQ ID NO: 868 - protein, 11 aa, Artificial Sequence
  Framework Region 4 of the Heavy Chain of Consensus Cluster #17 as described in Table 2.
  misc_feature (6)..(6): Xaa is Serine or Leucine
  misc_feature (11)..(11): Xaa is Serine, no amino acid or Alanine
WGQGTXVTVSX

SEQ ID NO: 869 - protein, 10 aa, Artificial Sequence
  Framework Region 4 of the Heavy Chain of ITI_128H as described in Table 2.
WGQGTLVTVS

SEQ ID NO: 870 - protein, 11 aa, Artificial Sequence
  Framework Region 4 of the Heavy Chain of Consensus Cluster #13 as described in Table 2.
  misc_feature (6)..(6): Xaa is Leucine or Serine
  misc_feature (11)..(11): Xaa is Alanine or Serine
WGQGTXVTVSX

SEQ ID NO: 871 - protein, 11 aa, Artificial Sequence
  Framework Region 4 of the Heavy Chain of Consensus Cluster #18 as described in Table 2.
  misc_feature (6)..(6): Xaa is Leucine, Threonine or Alanine
  misc_feature (7)..(7): Xaa is Valine or Leucine
  misc_feature (11)..(11): Xaa is Alanine or Serine
WGQGTXXTVSX

SEQ ID NO: 872 - protein, 11 aa, Artificial Sequence
  Framework Region 4 of the Heavy Chain of H5S14-1AH as described in Table 2.
WGQGTALTVSS

SEQ ID NO: 873 - protein, 11 aa, Artificial Sequence
  Framework Region 4 of the Heavy Chain of Consensus Cluster #22 as described in Table 2.
  misc_feature (6)..(6): Xaa is Leucine, Serine or Threonine
  misc_feature (7)..(7): Xaa is Valine or Leucine
  misc_feature (11)..(11): Xaa is Alanine or Serine
WGQGTXXTVSX

SEQ ID NO: 874 - protein, 107 aa, Artificial Sequence
  Full-Length sequence of the Light Chain of H5S14-15AL as described in Table 3.
SIVMTQTPKFLLVSAGDRVTITCKASQSVSNDVAWYQQKPGQSPKLLIYYESNRYTGVPDRFTGSGYGTDFTFTISTVQAEDLAVYFCQQDYSSPWTFGGGTKLEIK

SEQ ID NO: 875 - protein, 107 aa, Artificial Sequence
  Full-Length sequence of the Light Chain of H5S14-16AL as described in Table 3.
SIVMTQTPKFLLVSAGDRVTITCKASQSVSNDVAWYQQKPGQSPKLLIYYASNRYTGVPDRFTGSGYGTDFTFTISTVQAEDLAVYFCQQDYSSPWTFGGGTKLEIK

SEQ ID NO: 876 - protein, 106 aa, Artificial Sequence
  Full-Length sequence of the Light Chain of H5S14-18AL as described in Table 3.
QIVLTQSPAIMSASPGEKVTMTCSASSSVSYMHWYQQKSGTSPKRWIYDTSKLASGVPARFSGSGSGTSYSLTISSMEAEDAATYYCQQWSSNPFTFGSGTKLEIK

SEQ ID NO: 877 - protein, 107 aa, Artificial Sequence
  Full-Length sequence of the Light Chain of H5S14-1AL as described in Table 3.
DVQITQSPSYLAASPGETITINCRASKSISKYLAWYQEKPGKTNQLLIYSGSTLQSGIPSRFSGSGSGTDFTLTISSLEPEDFAMYYCQQHNEYPWTFGGGTKLEIK

SEQ ID NO: 878 - protein, 111 aa, Artificial Sequence
  Full-Length sequence of the Light Chain of H5S14-20AL as described in Table 3.
NIVLTQSPASLAVSLGQRATISCRASESVDSYGNSFMHWYQQKPGQPPKLLIYLASNLESGVPARFSGSGSRTDFTLTIDPVEADDAATYYCQQNNEDPYTFGGGTKLEIK

SEQ ID NO: 879 - protein, 107 aa, Artificial Sequence
  Full-Length sequence of the Light Chain of H5S14-24AL as described in Table 3.
SIVMTQTPKFLLVSAGDRVTITCKASQSVSNDVAWYQQKPGQSPKLLIYYASNRYTGVPDRFTGSGYGTDFTFTISTVQAEDLAVYFCQQDYSSPLTFGAGTKLELK

SEQ ID NO: 880 - protein, 107 aa, Artificial Sequence
  Full-Length sequence of the Light Chain of H5S14-25AL as described in Table 3.
DIQMTQSSSYLSVSLGGRVTITCKASDHINNWLAWYQQKPGNAPRLLISGATSLETGVPPRFSGSGSGKDYTLSITSLQTEDVATYYCQQYWSTPYTFGGGTKLEIK

SEQ ID NO: 881 - protein, 106 aa, Artificial Sequence
  Full-Length sequence of the Light Chain of H5S14-4AL as described in Table 3.
QIVLTQSPAIMSASPGEKVTISCSASSSVSYMYWYQQKPGSSPKPWIYRTSNLASGVPARFSGSGSGTSYSLTISSMEAEDAATYYCQQYHSYPLTFGAGTKLELK

SEQ ID NO: 882 - protein, 106 aa, Artificial Sequence
  Full-Length sequence of the Light Chain of H5S14-4BL as described in Table 3.
QIVLTQSPAIMSASPGEKVTISCSASSSVSYMYWYQQKPGSSPKPWIYRTSNLASGVPARFSGSGSGSSYSLTISSMEAEDAATYYCQQYHSYPLTFGAGTKLELK

SEQ ID NO: 883 - protein, 107 aa, Artificial Sequence
  Full-Length sequence of the Light Chain of H5S14-6AL as described in Table 3.
DIQMTQSPASQSASLGESVTITCLASQTIGTWLAWYQQKPGKSPQLLIYAATSLADGVPSRFSGSGSGTKFSFKISSLQAEDFVSYYCQQLHSTPYTFGGGTKLEIK

SEQ ID NO: 884 - protein, 111 aa, Artificial Sequence
  Full-Length sequence of the Light Chain of H5S15-13AL as described in Table 3.
DIVLTQSPASLAVSLGQRATISCKASQSVDYDGESYMNWYQQKPGQPPKLLIYAASNLDSGIPARFSGSGSGTDFTLNIHPVEEEDAATYYCQQSNEDPLTFGAGTKLELK

SEQ ID NO: 885 - protein, 107 aa, Artificial Sequence
  Full-Length sequence of the Light Chain of H5S15-14AL as described in Table 3.
DIVMTQSQKFMSTSVGDRVSVTCKASQNVGTNVAWYQQKPGQSPKALIYSASYRYSGVPDRFTGSGSGTDFTLTISNVQSEDLAEYFCQQYNSYPYTFGGGTNLEIK

SEQ ID NO: 886 - protein, 107 aa, Artificial Sequence
  Full-Length sequence of the Light Chain of H5S15-14BL as described in Table 3.
DIVMTQSQKFMSTSVGDRVSVTCKASQNVGTNVAWYQQRPGQSPKSLIYSASYRYSGVPDRFTGSGSGTDFTLTISNVQSEDLADYFCQQYNSYPYTFGGGAKLEIK

SEQ ID NO: 887 - protein, 106 aa, Artificial Sequence
  Full-Length sequence of the Light Chain of H5S15-14CL as described in Table 3.
DIVMTQSQKFMSTSVGDRVSVTCKASQNVGTNVAWYQQKPGQSPKALIYSASYRYSGVPDRFTGSGSGTDFTLTISNVQSEDLAEYFCQQYNSYPYTFGGGTKLEI

SEQ ID NO: 888 - protein, 106 aa, Artificial Sequence
  Full-Length sequence of the Light Chain of H5S15-15AL as described in Table 3.
QIVLTQSPAIMSASPGEKVTMTCSASSSVSYMHWYQQKSGTSPKRWIYDTSKLASGVPARFSGSGSGTSYSLTISSMEAEDAATYYCQQWSSNPLTFGAGTKLELK

SEQ ID NO: 889 - protein, 108 aa, Artificial Sequence
  Full-Length sequence of the Light Chain of H5S15-18AL as described in Table 3.
ENVLTQSPAIMSASPGEKVTMTCRASSSVSSSYLHWYQQKSGASPKLWIYSTSNLASGVPARFSGSGSGTSYSLTISSVEAEDAATYYCQQYSGYPLTFGGGTKLEIK

SEQ ID NO: 890 - protein, 111 aa, Artificial Sequence
  Full-Length sequence of the Light Chain of H5S15-24AL as described in Table 3.
DIVLTQSPASLAVSLGQRATISCKASQSVDYDGNSYMNWYQQKPRQPPKLLIYAASNLESGIPARFRGSGSGTDFTLNIHPVEEEDAATYYCQQSNEDPFTFGSGTKLEIK

SEQ ID NO: 891 - protein, 107 aa, Artificial Sequence
  Full-Length sequence of the Light Chain of H5S15-28AL as described in Table 3.
DIQMTQTTSSLSVSLGDRVTISCRASQDISNYLNWYQQKPDGTVKLLIYYTSRLHSGVPSRFSGSGSGSDYSLTISNLEQEDIATYFCQQGNSLPWTFGGGTKLEIK

SEQ ID NO: 892 - protein, 108 aa, Artificial Sequence
  Full-Length sequence of the Light Chain of H5S15-29AL as described in Table 3.
EIVLTQSPALMTASPGEKVTITCSVSSTISSRNLHWYQQKSEASPKPWIYGTSNLASGVPVRFSGSGSGTSYSLTISSMEAEDAATYYCQQWNSYPLTFGSGTKLEIK

SEQ ID NO: 893 - protein, 108 aa, Artificial Sequence
  Full-Length sequence of the Light Chain of H5S15-4AL as described in Table 3.
EIVLTQSPALMAASPGEKVTITCSVSSGIRSSNLHWYQQKSETSPKPWIYGTSNLASGVPIRFSGSGSGTSYSLTISSMEAEDAATYYCQQWSSYPLTFGSGTKLEIK

SEQ ID NO: 894 - protein, 108 aa, Artificial Sequence
  Full-Length sequence of the Light Chain of H5S19-11AL as described in Table 3.
EIVLTQSPALMAASPGEKVTITCSVSSSISSSNLHWYQQKSETSPKPWIYGTSNLASGVPVRFSGSGSGTSYSLTISSMEAEDAATYYCQQWSSYPLTFGAGTKLELK

SEQ ID NO: 895 - protein, 107 aa, Artificial Sequence
  Full-Length sequence of the Light Chain of H5S19-17AL as described in Table 3.
DIQMTQTTSSLSASLGDRVTISCSASQGISNYLNWYQQKPDGTVKLLIYYTSSLHSGVPSRFSGSGSGTDYSLTISNLEPEDIATYYCQQYSKLPWTFGGGTKLEIK

SEQ ID NO: 896 - protein, 107 aa, Artificial Sequence
  Full-Length sequence of the Light Chain of H5S19-17BL as described in Table 3.
DIQMTQTTSSLSASLGDRVTISCSASQGISNYLNWYQQKPDGTVKLLIYYTSSLHSGVPSRFRGSGSGTDYSLTISNLEPEDIATYYCQQYSKLPWTFGGGTKLEIK

SEQ ID NO: 897 - protein, 107 aa, Artificial Sequence
  Full-Length sequence of the Light Chain of H5S19-17CL as described in Table 3.
DIQMTQTTSSLSASLGDRVTISCSASQGISNYLNWYQQKPDGTVKLLIYYTSSLHSGVPSRFSGSGSGTDYSLTISNLEPEDIATYFCQQYSKLPWTFGGGTKLEIK

SEQ ID NO: 898 - protein, 107 aa, Artificial Sequence
  Full-Length sequence of the Light Chain of H5S19-17DL as described in Table 3.
DIQMTQTTSSLSASLGDRVTISCSASQGISNYLNWYQQKPDGTVKLLIYYTSSLHSGVPSRFSGSGSGTDYSLSISNLEPEDIATYYCQQYSKLPWTFGGGTKLEIK

SEQ ID NO: 899 - protein, 107 aa, Artificial Sequence
  Full-Length sequence of the Light Chain of H5S19-17EL as described in Table 3.
DIQMTQTTSSLSASLGDRVTISCSASQGISNYLNWYQQKPDGTVKLLIYYTSSLHSGVPSRFSGSGSGTDYSLTFSNLEPEDIATYYCQQYSKLPWTFGGGTKLEIK

SEQ ID NO: 900 - protein, 106 aa, Artificial Sequence
  Full-Length sequence of the Light Chain of H5S19-17FL as described in Table 3.
DIQMTQTTSSLSASLGDRVTISCSASQGISNYLNWYQQKPDGTVKLLIYYTSSLHSGVPSRFSGSGSGTDYSLTISNLEPEDIATYYCQQYSKLPWTFGGGTKLEI

SEQ ID NO: 901 - protein, 110 aa, Artificial Sequence
  Full-Length sequence of the Light Chain of H5S19-1AL as described in Table 3.
NIVLTQSPASLAVSLGQRATISCRASESVDSYGNSLMHWYQQKPGQPPKLLIYLASNLESGVPARFSGSGSRTDFTLTIDPVEADDAATYYCQQNNEDPPTFGGGTKLEI

SEQ ID NO: 902 - protein, 107 aa, Artificial Sequence
  Full-Length sequence of the Light Chain of H5S19-20AL as described in Table 3.
DIQMTQTTSSLSASLGDRVTISCTASQGISNYLNWYQQKPDGTVKLLIYYTSTLHSGVPSRFSGSGSGTDYSLTISNLEPEDIATYYCQQYFKLPWTFGGGTKLEIK

SEQ ID NO: 903 - protein, 107 aa, Artificial Sequence
  Full-Length sequence of the Light Chain of H5S19-23AL as described in Table 3.
DIQMTQTTSSLSASLGDRVTISCSASQGINNYLNWYQQKPDGTVKLLIYYTSSLHSGVPSRFSGSGSGTDYSLTISNLEPEDIATYYCQQYSKLPWTFGGGTKLEIK

SEQ ID NO: 904 - protein, 107 aa, Artificial Sequence
  Full-Length sequence of the Light Chain of H5S19-26AL as described in Table 3.
DIQMTQTTSSLSASLGDRVTISCTASQGINNYLNWYQQKPDGTVKLLIYYTSTLHSGVPSRFSGSGSGTDYSLTISNLEPEDIATYYCQQYFKLPWTFGGGTKLEIK

SEQ ID NO: 905 - protein, 107 aa, Artificial Sequence
  Full-Length sequence of the Light Chain of H5S19-28AL as described in Table 3.
DIQMTQTTSSLSASLGDRVTISCTASQGISNYLNWYQQKPDGTVKLLIYYTSTLHSGVPSRFSGSGSGTDYSLTISNLEPEDIATYYCQQYSKLPWTFGGGTKLAIK

SEQ ID NO: 906 - protein, 106 aa, Artificial Sequence
  Full-Length sequence of the Light Chain of H5S19-6AL as described in Table 3.
QIVLTQSPAIMSASPGEKVTMTCSASSSVSYMYWYQQKPGSSPRLLIYDTSNLASGVPVRFSGSGSGTSYSLTISRMEAEDAATYYCQQWSSYPFTFGSGTKLEIK

SEQ ID NO: 907 - protein, 107 aa, Artificial Sequence
  Full-Length sequence of the Light Chain of H5S19-8AL as described in Table 3.
DVQITQSPSYLAASPGETITINCRTSKNISKYLAWYQEKPGKTNKLLIYSGSTLQSGIPSRFSGSGSGTDFTLTISSLEPEDFVMYHCQQHNEYPWTFGGGTKLEIK

SEQ ID NO: 908 - protein, 111 aa, Artificial Sequence
  Full-Length sequence of the Light Chain of H5S20-13AL as described in Table 3.
DIVLTQSPASLAVSLGQRATISCKASQSVDYDGNSYMNWYQQKPGQPPKLLIYAASNLESGIPARFSGSGSGTDFTLNIHPVEEEDAATYYCQQSNEDPWTFGGGTKLEIK

SEQ ID NO: 909 - protein, 105 aa, Artificial Sequence
  Full-Length sequence of the Light Chain of H5S20-16AL as described in Table 3.
QIVLTQSPALMSASPGEKVTMTCSASSSVSFIYWYQQKPRSSPKPWISLTSNLASGVPARFSGSGSGTSYSLTISSMEAEDAATYYCQQWSSNPLTFGAGTKLEL

SEQ ID NO: 910 - protein, 105 aa, Artificial Sequence
  Full-Length sequence of the Light Chain of H5S20-16BL as described in Table 3.
QIVLTQSPALMSASPGEKVTMTCSASSSVSFIYWYQQKPRSSPKPWIYLTSNLASGVPARFSGSGSGTSYSLTISSMEAEDAATYYCQQWSSNPLTFGAGTKLEL

SEQ ID NO: 911 - protein, 107 aa, Artificial Sequence
  Full-Length sequence of the Light Chain of H5S20-17AL as described in Table 3.
DIVMTQSPATLSVTPGDRVSLSCRASRTISDYLHWYQQKSHESPRLLIKYASQSISGIPSRFSGSGSGSDFTLSISSVEPEDVGMYYCQNGHSFPLTFGAGTKLELK

SEQ ID NO: 912 - protein, 111 aa, Artificial Sequence
  Full-Length sequence of the Light Chain of H5S20-18AL as described in Table 3.
NIVLTQSPASLAVSLGQRATISCRASESVDSYGNSFMHWYQQKPGQPPKLLIYLASNLESGVPARFSGSGSRTDFTLTIDPVEADDAATYYCQQNYADPWTFGGGTKLEIK

SEQ ID NO: 913 - protein, 111 aa, Artificial Sequence
  Full-Length sequence of the Light Chain of H5S20-20AL as described in Table 3.
DIVLTQSPASLAVSLGQRATISCKASQSVDYDGDSFMNWYQQKPGQPPKLLIYAASNLESGIPARFSGSGSGTDFTLNIHPVEEEDAATYYCQQSNEDPWTFGGGTKLEIK

SEQ ID NO: 914 - protein, 113 aa, Artificial Sequence
  Full-Length sequence of the Light Chain of H5S20-23AL as described in Table 3.
DIVMTQSPSSLTVPAGEKVTMSCKSSQSLLNSENQKNYLTWYQQKPGQPPKLLIYWASTRESGVPDRFTGSGSGTDFTLTISSVQAEDLAVYYCQSDYSYPLTFGAGTKLELK

SEQ ID NO: 915 - protein, 107 aa, Artificial Sequence
  Full-Length sequence of the Light Chain of H5S20-32AL as described in Table 3.
DIVMTQSQKFMSTSVGDRVSVTCKASQNVGTNVAWYQQKPGQSPKALIYSASYRYSGVPDRFTGSGSGTDFTLTISNVQSEDLAEYFCQQYNSYPFTFGSGTKLEIK

SEQ ID NO: 916 - protein, 106 aa, Artificial Sequence
  Full-Length sequence of the Light Chain of H5S20-34AL as described in Table 3.
QIVLTQSPALMSASPGEKVTMTCTASSSVSYMYWYQQKPRSSPKPWIYLTSNLASGVPARFSGSGSGTSYSLTISSMEAEDAATYYCQQWSSNPLTFGAGTKLELR

SEQ ID NO: 917 - protein, 107 aa, Artificial Sequence
  Full-Length sequence of the Light Chain of H5S20-36AL and H5S20-43AL as described in Table 3.
DIVMTQSQKFMSTSVGDRVSVTCKASQNVGTNVAWYQQKPGQSPKALIYSASYRYSGVPDRFTGSGSGTDFTLTISNVQSEDLAEYFCQQYNSYPLTFGGGTKLEIK

SEQ ID NO: 918 - protein, 107 aa, Artificial Sequence
  Full-Length sequence of the Light Chain of H5S20-40AL as described in Table 3.
DIVMTQSQKFMSTSVGDRVSVTCKASQNVGTNVAWYQQKPGQSPKALIYSASYRYSGVPDRFTGSGSGTDFTLTISNVQSEDLAEYFCQQYNSYPLTFGAGTKLELK

SEQ ID NO: 919 - protein, 111 aa, Artificial Sequence
  Full-Length sequence of the Light Chain of H5S20-8AL as described in Table 3.
DIVLTQSPASLAVSLGQRATISCKASQSVDYDGDSYMNWYQQKPGQPPKLLIYAASNLESGIPARFSGSGSGTDFTLNIHPVEEEDAATYYCQQSNEDPWTFGGGTKLEIK

SEQ ID NO: 920 - protein, 111 aa, Artificial Sequence
  Full-Length sequence of the Light Chain of H5S20-8BL as described in Table 3.
DIVLTQSPASLAVSLGQRATISCKASQSVDYDGDSYMNWFQQKPGQPPKLLIYAASNLESGIPARFSGSGSGTDFTLNIHPVEEEDAATYYCQQSNEDPWTFGGGTKLEIK

SEQ ID NO: 921 - protein, 111 aa, Artificial Sequence
  Full-Length sequence of the Light Chain of ITI_021L as described in Table 3.
NIVLTQSPASLAVSLGQRATISCRASESVDSYGNSFMHWYQQKPGQPPKLLIYLASNLESGVPARFSGSGSRTDFTLTIDPVEADDAATYYCQQNNEDPLTFGGGTKLEIK

SEQ ID NO: 922 - protein, 106 aa, Artificial Sequence
  Full-Length sequence of the Light Chain of ITI_040L as described in Table 3.
QIVLTQSPAIMSASPGEKVTISCSASSSISYMYWYQQKPGSSPKPWIYRTSNLASGVPARFSGSGSGTSYSLTISSMEAEDAATYYCQQYHSYPLTFGAGTKLELK

SEQ ID NO: 923 - protein, 108 aa, Artificial Sequence
  Full-Length sequence of the Light Chain of ITI_045L as described in Table 3.
EIVLTQSPTTMAASPGEKITITCSASSSINSNYLHWYQQKPGFSPKLLIYRTSNLASGVPPRFSGSGSGTSYSLTIGTMEAEDVATYYCQQGSTIPYTFGGGAKLEIK

SEQ ID NO: 924 - protein, 106 aa, Artificial Sequence
  Full-Length sequence of the Light Chain of ITI_082L as described in Table 3.
ENVLTQSPAIMSASLGEKVTMSCRASSSVNYMYWYQQKSDASPKLWIYYTSNLAPGVPARFSGSGSGNSYSLTISSMEGEDAATYYCQQFTSSTWTFGGGTKLEIK

SEQ ID NO: 925 - protein, 106 aa, Artificial Sequence
  Full-Length sequence of the Light Chain of ITI_083L as described in Table 3.
ENVLTQSPAIMSASLGEKVTMSCRASSSVNYMFWYQQKSDASPKLWIYSTSNLTPGVPARFSGSGSGNSYSLTISSMEAEDAATYYCQQFTSSTWTFGGGTKLEIK

SEQ ID NO: 926 - protein, 108 aa, Artificial Sequence
  Full-Length sequence of the Light Chain of ITI_131L as described in Table 3.
EIVLTQSPALMAASPGEKVTITCSVSSSISSSNLHWYQQKSETSPKPWIYGTSNLASGVPVRFSGSGSGTSYSLTISSMEAEDAATYYCQQWSSYPLTFGSGTKLEIK

SEQ ID NO: 927 - protein, 107 aa, Artificial Sequence
  Full-Length sequence of the Light Chain of ITI_144L as described in Table 3.
DIQMTQTPSSLSASLGDRVTISCSASQDINNYLNWYQQKPDGTVKLLIYYTSSLHSGAPSRFSGSGSGTDYSLTISNLDPEDIATYYCQQYSKLPWTFGGGTKLEIK

SEQ ID NO: 928 - protein, 107 aa, Artificial Sequence
  Full-Length sequence of the Light Chain of ITI_145L as described in Table 3.
DIQMTQTPSSLSASLGDRVTISCSASQDINNYLNWYQQKPDGTVKLLIFYTSSLHSGAPSRFSGSGSGTDYSLTISNLDPEDIATYYCQQYSKLPWTFGGGTKLEIK

SEQ ID NO: 929 - protein, 107 aa, Artificial Sequence
  Full-Length sequence of the Light Chain of ITI_146L as described in Table 3.
DIQMTQTTSSLSASLGDRVTISCSASQGIRNYLNWYQQKPDGTVKLLIYYTSSLHSGVPSRFSGSGSGTDYSLTISNLEPEDIATYYCQQYSKLPWTFGGGTKLEIK

SEQ ID NO: 930 - protein, 107 aa, Artificial Sequence
  Full-Length sequence of the Light Chain of ITI_162L as described in Table 3.
DIQMTQTTSSLSASLGDRVTISCTASQGISNYLNWYQQKPDGTVKLLIYYTSTLHSGVPSRFSGSGSGTDYSLTINNLEPEDIATYYCQQYSKLPWTFGGGTKLEIK

SEQ ID NO: 931 - protein, 107 aa, Artificial Sequence
  Full-Length sequence of the Light Chain of ITI_166L as described in Table 3.
DIQMTQTTSSLSASLGDRVTISCSASQDISNYLNWYQQKPDGTVKLLIYYTSSLHSGVPSRFSGSGSGTDYSLTISNLEPEDIATYYCQQYSKLPWTFGGGTKLEIK

SEQ ID NO: 932 - protein, 107 aa, Artificial Sequence
  Full-Length sequence of the Light Chain of ITI_169L as described in Table 3.
DIQMTQTTSSLSASLGDRVTISCSASQGITKYLNWYQQKPDGTVKLLIYYTSSLHSGVPSRFSGSGSGTDYSLTISNLEPEDIATYYCQQYSKLPWTFGGGTKLEIK

SEQ ID NO: 933 - protein, 111 aa, Artificial Sequence
  Full-Length sequence of the Light Chain of ITI_200L as described in Table 3.
DIVLTQSPASLAVSLGQRATISCKASQSVDYDGESYINWYQQRPGQPAKLLIFAASNLESGIPARFSGSGSGTDFTLNIHPVEEEDAASYYCQHCYEDPWTFGGGTKLEIK

SEQ ID NO: 934 - protein, 107 aa, Artificial Sequence
  Full-Length sequence of the Light Chain of ITI_236L as described in Table 3.
DIQMTQTTSSLSASLGDRVTISCRASQDISNYLNWYQQKPDGTVKLLIYYTSRLHSGVPSRFSGSGSGTDYSLTISNLEQEDIATYFCQQGNTLPYTFGGGTKLEIK

SEQ ID NO: 935 - protein, 107 aa, Artificial Sequence
  Full-Length sequence of the Light Chain of ITI_237L as described in Table 3.
DIQMTQTTSSLSASLGDRVTISCSASQGISNYLNWYQQKPDGTVKLLIYYTSSLHSGVPSRFSGSGSGTDYSLTISNLEPEDIATYYCQQYSKLPRTFGGGTKLEIK

SEQ ID NO: 936 - protein, 112 aa, Artificial Sequence
  Full-Length sequence of the Light Chain of H5S14-11AL as described in Table 3.
DVVMTQTPLTLSVTIGQPASISCKSSQSLLDSDGKTYLNWLLQRPGQSPKRLIYLVSKLDSGVPDRFTGSGSGTDFTLKISRVEAEDLGVYYCWQLTHFPQTFGGGTKLEIK

SEQ ID NO: 937 - protein, 112 aa, Artificial Sequence
  Full-Length sequence of the Light Chain of H5S14-13AL and H5S19-7AL as described in Table 3.
DVLMTQTPLSLPVSLGDQASISCRSSQSIVHSNGNTYLEWYLQKPGQSPKLLIYKVSNRFSGVPDRFSGSGSGTDFTLKISRVEAEDLGVYYCFQGSHVPWTFGGGTKLEIK

SEQ ID NO: 938 - protein, 112 aa, Artificial Sequence
  Full-Length sequence of the Light Chain of H5S14-17AL as described in Table 3.
DVVMTQTPLTLSVTIGQPASISCKSSQSLLDSDGKTYLNWLLQRPGQSPKRLIYLVSKLDSGVPDRFTGSGSGTDFTLKISRVEAEDLGVYYCWQVTHFPQTFGGGTKLEIK

SEQ ID NO: 939 - protein, 112 aa, Artificial Sequence
  Full-Length sequence of the Light Chain of H5S14-2AL as described in Table 3.
DVVMTQTPLTLSVTIGQPASISCKSSQSLLDSDGKTYLNWLLQRPGQSPKRLIYLVSKLDSGVPDRFTGSGSGTDFTLKISRVEAEDLGVYYCWQGTHFPHAFGGGTKLEIK

SEQ ID NO: 940 - protein, 112 aa, Artificial Sequence
  Full-Length sequence of the Light Chain of H5S15-12CL as described in Table 3.
DVVMTQTPLTLSVTIGQPASISCKSSQSLLDSDGKTYLNWLLQRPGQSPKRLIYLVSKLDSGVPDRFTGSGSGTDFTLKISRVEAEDLGIYYCWQGTHFPQTFGGGTKLEIK

SEQ ID NO: 941 - protein, 112 aa, Artificial Sequence
  Full-Length sequence of the Light Chain of H5S15-16AL as described in Table 3.
DVLMTQTPLSLPVSLGDQASISCRSSQSIVHSNGITYLEWYLQKPGQSPELLIYKVSNRFSGVPDRFSGSGSGTDFTLKISRVEAEDLGVYYCFQGSHVPLTFGAGTKLELK

SEQ ID NO: 942 - protein, 112 aa, Artificial Sequence
  Full-Length sequence of the Light Chain of H5S15-17AL as described in Table 3.
DVVMTQTPLTLSVTVGQPASISCKSSQSLLDSDGKTYLNWLLQRPGQSPKRLIYLVSKRDSGVPDRFTGSGSGTDFTLKISRVEAEDLGVYYCWQNTHFPQTFGGGTKLEIK

SEQ ID NO: 943 - protein, 106 aa, Artificial Sequence
  Full-Length sequence of the Light Chain of H5S15-1AL as described in Table 3.
ENVLTQSPAIMSASPGEKVTMTCSAGSSVSYMHWYQQKSSTSPKLWIYDTSKLPSGVPGRFSGSGSGNSYSLTISSMEAEDVATYYCFQGSGFPLTFGSGTKLEIK

SEQ ID NO: 944 - protein, 112 aa, Artificial Sequence
  Full-Length sequence of the Light Chain of H5S15-31AL as described in Table 3.
DVVMTQTPLTLSVTIGQPASISCKSSQSLLDSDGKTYLNWLLQRPGQSPKRLIYLVSKLDSGVPDRFTGSGSGTDFTLKISRVEAEDLGVYYCWQATHFPQTFGGGTNLEIK

SEQ ID NO: 945 - protein, 112 aa, Artificial Sequence
  Full-Length sequence of the Light Chain of H5S15-3AL as described in Table 3.
DVLMTQTPLSLPVSLGDQASISCRSSQSIVHSNGNTYLEWYLQKPGQSPKLLIYKVSNRFSGVPDRFSGSGSGTDFTLKISRVEAEDLGVYYCFQGSHVPLTFGAGTKLELK

SEQ ID NO: 946 - protein, 112 aa, Artificial Sequence
  Full-Length sequence of the Light Chain of H5S15-3BL as described in Table 3.
DVLMTQTPLSLTVSLGHQASISCRSSQSIVHSNGNTYLEWYLQKPGQSPKLLIYKVSNRFSGVPDRFSGSGSGTDFTLKISRVEAEDLGVYYCFQGSHVPLTFGAGTKLELK

SEQ ID NO: 947 - protein, 112 aa, Artificial Sequence
  Full-Length sequence of the Light Chain of H5S15-6AL as described in Table 3.
DVVMTQTPLTLSVTIGQPASISCKSSQSLLDSDGKTYLNWLLQRPGQSPKRLIYLVSKLDSGVPDRFTGSGSGTEFTLKISRVEAEDLGVYYCWQNTHFPQTFGGGTKLEIK

SEQ ID NO: 948 - protein, 112 aa, Artificial Sequence
  Full-Length sequence of the Light Chain of H5S20-19AL as described in Table 3.
DVVMTQTPLTLSVTIGQPASISCKSSQSLLDSDGKTYLSWLLQRPGQSPKRLIYLVSKLDSGVPDRFTGSGSGTDFTLKISRVEAEDLGVYYCWQNTHFPQTFGGGTKLEIK

SEQ ID NO: 949 - protein, 112 aa, Artificial Sequence
  Full-Length sequence of the Light Chain of H5S20-19BL as described in Table 3.
DVVMTQTPLSLSVTIGQPASISCKSSQSLLDSDGKTYLSWLLQRPGQSPKRLIYLVSKLDSGVPDRFTGSGSGTDFTLKISRVEAEDLGVYYCWQNTHFPQTFGGGTKLEIK

SEQ ID NO: 950 - protein, 112 aa, Artificial Sequence
  Full-Length sequence of the Light Chain of H5S20-21AL as described in Table 3.
DVLMTQTPLSLPVSLGDQASISCRSSQSIVHSNGNTYLEWYLQKPGQSPKLLIYKVSNRVSGVPDRFSGSGSGTDFTLKISRVEAEDLGVYYCFQGSHVPLTFGAGTKLELK

SEQ ID NO: 951 - protein, 112 aa, Artificial Sequence
  Full-Length sequence of the Light Chain of H5S20-24AL as described in Table 3.
DVVMTQTPLTLSVTIGQPASISCKSSQSLLDSDGKTYLNWLLQRPGQSPKRLIYLVSKLDSGVPDRFTGSGSGTDFTLKISRVEAEDLGVYYCWQNTHFPQTLGGGTKLEIK

SEQ ID NO: 952 - protein, 112 aa, Artificial Sequence
  Full-Length sequence of the Light Chain of H5S20-25AL as described in Table 3.
DVVMTQTPLTLSVTIGQPASISCKSSQSLLDSDGKTYLNWLLQRPGQSPKRLIYLVSKLDSGVPDRFTGSGSGTDFTLKISRVEAEDLGVYYCWQGTHFPQTFGGGTKLEIK

SEQ ID NO: 953 - protein, 112 aa, Artificial Sequence
  Full-Length sequence of the Light Chain of H5S20-26AL as described in Table 3.
DVVMTQTPLTLSVTIGQPASISCKSSQSLLDSDGKTYLYWLLQRPGQSPKRLIYLVSKLDSGVPDRFTGSGSGTYFTLKISRVEAEDLGVYYCWQNTHFPQTFGGGTKLEIK

SEQ ID NO: 954 - protein, 112 aa, Artificial Sequence
  Full-Length sequence of the Light Chain of H5S20-31AL as described in Table 3.
DVVMTQTPLTLSVTIGQPASISCKSSQSLLDSDGKTYLNWLLQRPGQSPKRLIYLVSKVDSGVPDRFTGSGSGTDFTLKISRVEAEDLGVYYCWQNTHFPQTFGGGTKLEIK

SEQ ID NO: 955 - protein, 112 aa, Artificial Sequence
  Full-Length sequence of the Light Chain of H5S20-39AL as described in Table 3.
DVLMTQTPLSLPVSLGDQVSISCRSSQNIVHSNGNTYLEWYLQKPGQSPKLLIYKVSNRFSGVPDRFSGSGSGTDFTLKISRVEAEDLGVYYCFQGSHVPLTFGAGTKLELK

SEQ ID NO: 956 - protein, 112 aa, Artificial Sequence
  Full-Length sequence of the Light Chain of H5S20-3BL as described in Table 3.
DVVMTQTPLTLSVTIGQPASISCKSSQSLLDSDGKTYLNWLLQRPGQSPKRLIYLVSKLDSGVPDRFTGSGSGTDFTLKISRVEAEDLGVYYCWQATHFPQTFGGGTKLEIK

SEQ ID NO: 957 - protein, 113 aa, Artificial Sequence
  Full-Length sequence of the Light Chain of H5S20-41AL as described in Table 3.
DVVMTQTPLTLSVTIGQPASISCKSSQSLLYSNGKTYLNWLLQRPGQSPKRLIYLVSKLDSGVPDRFTGSGSGTDFTLKISRVEAEDLGVYYCVQGTHFPMYTFGGGTKLEIK

SEQ ID NO: 958 - protein, 112 aa, Artificial Sequence
  Full-Length sequence of the Light Chain of H5S20-7AL as described in Table 3.
DVVMTQTPLTLSVTIGQPASISCKSSQSLLDSDGKTYLNWLLQRPGQSPKRLIYLVSKLDSGVPDRFTGSGSGTDFTLKISRVEAEDLGVYYCWQNTHFPQTFGGGTKLEIK

SEQ ID NO: 959 - protein, 112 aa, Artificial Sequence
  Full-Length sequence of the Light Chain of H5S20-7BL as described in Table 3.
DVVMTQTPLTLSVTIGQPASISCKSSQSLLDSDGKTYLNWLLQRPGQSPKRLIYLVSKLDSGVPDRFTGSGSGTDFTLKISRVEAEDLGIYYCWQNTHFPQTFGGGTKLEIK

SEQ ID NO: 960 - protein, 112 aa, Artificial Sequence
  Full-Length sequence of the Light Chain of H5S20-7CL as described in Table 3.
DVVMTQTPLTLSITIGQPASISCKSSQSLLDSDGKTYLNWLLQRPGQSPKRLIYLVSKLDSGVPDRFTGSGSGTDFTLKISRVEAEDLGVYYCWQNTHFPQTFGGGTKLEIK

SEQ ID NO: 961 - protein, 112 aa, Artificial Sequence
  Full-Length sequence of the Light Chain of H5S20-7DL as described in Table 3.
DVVMTQTPLTLSVTIGQPASISCKSSQSLLDSDGKTYLNWLLQRPGQSPKRLIYLVSKLDSGVPDRFTGSGSGTDFTLKISRVEAEDLGVYYCWQNTHFPQTFGGGTELEIK

SEQ ID NO: 962 - protein, 112 aa, Artificial Sequence
  Full-Length sequence of the Light Chain of H5S20-7EL as described in Table 3.
DVVMTQTPLTLSVTIGQTASISCKSSQSLLDSDGKTYLNWLLQRPGQSPKRLIYLVSKLDSGVPDRFTGSGSGTDFTLKISRVEAEDLGVYYCWQNTHFPQTFGGGTKLEIK

SEQ ID NO: 963 - protein, 112 aa, Artificial Sequence
  Full-Length sequence of the Light Chain of H5S20-9AL as described in Table 3.
DVLMTQTPLSLPVNLGDQASISCRSSQSIVHSNGNTYLEWYLQKPGQSPKLLIYKVSNRFSGVPDRFSGSGSGTDFTLKISRVEAEDLGVYYCFQGSHVPLTFGAGTKLELK

SEQ ID NO: 964 - protein, 112 aa, Artificial Sequence
  Full-Length sequence of the Light Chain of H5S20-9DL as described in Table 3.
DVLMTQTPLSLPVSLGDQASISCRSSQSIVHSNGNTYLEWYLQKPGQSPKLLIYKVSNRFSGVPDRFSGSGSGTDFTLKISRVEAEDLGVYYCFQGSHVPLTFGTGTKLELK

SEQ ID NO: 965 - protein, 112 aa, Artificial Sequence
  Full-Length sequence of the Light Chain of H5S20-9EL as described in Table 3.
DVLMTQTPLSLPVSLGDQASISCRSSQSIVHSNGNTYLEWYLQKPGQSPNLLIYKVSNRFSGVPDRFSGSGSGTDFTLKISRVEAEDLGVYYCFQGSHVPLTFGTGTKLELK

SEQ ID NO: 966 - protein, 112 aa, Artificial Sequence
  Full-Length sequence of the Light Chain of ITI_047L as described in Table 3.
DVVMTQTPLTLSVTIGQPASISCKSSQSLLDSDGKTYLNWLLQRPGQSPKRLIYLVSKLDSGVPDRFTGNGSGTDFTLKISRVEAEDLGVYYCWQATHFPQTFGGGTKLEIK

SEQ ID NO: 967 - protein, 112 aa, Artificial Sequence
  Full-Length sequence of the Light Chain of ITI_091L as described in Table 3.
DVLMTQTPLSLPVSLGDQASISCRSSQSIVHSNGNTYLEWYLQKPGQSPKLLIYKVSNRFSGVPDRFSGSGSGTDFTLNISRVEAEDLGVYYCFQGSHVPLTFGAGTKLELK

SEQ ID NO: 968 - protein, 104 aa, Artificial Sequence
  Full-Length sequence of the Light Chain of H5S14-3AL as described in Table 3.
QIVLTQSPAIMSASLGEEITLTCSASSSVSYMQWYQQKSGTSPKLLIYSTSNLASGVPSRFSGSGSGTFYSLTISSVEAEDAADYYCHQWSSYPTFGGGTELEI

SEQ ID NO: 969 - protein, 105 aa, Artificial Sequence
  Full-Length sequence of the Light Chain of H5S14-5AL as described in Table 3.
QIVLTQSPAIISASLGEEVTLTCSASSSVSYMHWYQQKSGTSPKLLIYSTSNLASGVPSRFSGSGSGTFYSLTISSVEAEDAADYYCHQWSSYLTFGAGTKLELK

SEQ ID NO: 970 - protein, 106 aa, Artificial Sequence
  Full-Length sequence of the Light Chain of H5S15-8AL as described in Table 3.
QIVLTQSPAIMSASLGEEITLTCSASSSVSFMHWYQQKSGTSPKLLIYSTSNLASGVPSRFSGSGSGTFYSLTISSVEAEDAADYYCHQWSSYLWTFGGGAKLEIK

SEQ ID NO: 971 - protein, 108 aa, Artificial Sequence
  Full-Length sequence of the Light Chain of H5S19-10AL as described in Table 3.
QIVLTQSPAIMSASPGEKVTLTCSASSSVDSSYLFWYQQKPGSSPKLWIYSTSNLASGVPARFSGSGSGTSYSLTISSMEAEDAASYFCHQWSSYPWTFGGGTILEIK

SEQ ID NO: 972 - protein, 107 aa, Artificial Sequence
  Full-Length sequence of the Light Chain of H5S19-10BL as described in Table 3.
QIVLTQSPAIMSASPGEKVTLTCSASSSVDSSYLFWYQQKPGSSPKLWIYSTSNLASGVPARFSGSGSGTSYSLTISSMEAEDAASYFCHQWSSYPWTFGGGTILEI

SEQ ID NO: 973 - protein, 108 aa, Artificial Sequence
  Full-Length sequence of the Light Chain of H5S19-14AL as described in Table 3.
QIVLTQSPAIMSASPGEKVTLTCSASSSVDSSYLFWYQQKPGSSPKLWIYSTSNLASGVPARFSGSGSGTSYYLTLSSMEAEDAASYFCHQWSNFAWTFGGGTILEIK

SEQ ID NO: 974 - protein, 108 aa, Artificial Sequence
  Full-Length sequence of the Light Chain of H5S19-16AL as described in Table 3.
QIVLTQSPAIMSASPGEKVTLTCSASSSVDSSYLYWFQQKPGSSPKLWIYGTSNLASGVPARFSGSGSGTSYSLTISSMEAEDAASYFCHQWNSYPWTFGGGTKLEIK

SEQ ID NO: 975 - protein, 108 aa, Artificial Sequence
  Full-Length sequence of the Light Chain of H5S19-16BL as described in Table 3.
QIVLTQSPAIMSASPGEKVTLTCSASSSVDSSYLYWYQQKPGSSPKLWIYGTSNLASGVPARFSGSGSGTSYSLTISSMEAEDAASYFCHQWNSYPWTFGGGTKLEIK

SEQ ID NO: 976 - protein, 108 aa, Artificial Sequence
  Full-Length sequence of the Light Chain of H5S19-18AL as described in Table 3.
QIVLTQSPAIMSTSPGEKVTLTCSASSSVSSSYLYWYQQKPGSSPKLWIYSTSNLASGVPARFSGSGSGTSYSLTISSMEAEDAASYFCHQWSTYPWTFGGGTKLEIK

SEQ ID NO: 977 - protein, 108 aa, Artificial Sequence
  Full-Length sequence of the Light Chain of H5S19-19AL as described in Table 3.
QIVLTQSPAIMSASPGEKVTLTCSASSSVSSSYLYWYQQKPGSSPKLWIYSTSNLASGVPARFSGSGSGTSYSLTISSMEAEDAASYFCHQWSSYPWTFGGGTKLEIK

SEQ ID NO: 978 - protein, 108 aa, Artificial Sequence
  Full-Length sequence of the Light Chain of H5S19-3AL as described in Table 3.
QIVLTQSPAIMSASPGEKVTLTCSASSSVDSSYLFWYQQKPGSSPKLWIYSTSNLASGVPARFSGSGSGTSYSLTISSMEAEDAASYFCHQWNSYPWTFGGGTKLEIK

SEQ ID NO: 979 - protein, 108 aa, Artificial Sequence
  Full-Length sequence of the Light Chain of H5S19-4AL as described in Table 3.
QIVLTQSPAIMSASPGEKVTLTCSASSSVDSSYLFWYQQKPGSSPKLWIYSTSNLASGVPARFSGSGSGTSYYLTISSMEAEDAASYFCHQWSSYAWTFGGGTILEIK

SEQ ID NO: 980 - protein, 108 aa, Artificial Sequence
  Full-Length sequence of the Light Chain of H5S19-5AL as described in Table 3.
QIVLTQSPAIMSASPGEKVTLTCSASSSVDSSYLFWYQQKPGSSPKLWLYSTSNLASGVPARFSGSGSGTSYYLTISSMEAEDAASYFCHQWSNYAWTFGGGTILEIK

SEQ ID NO: 981 - protein, 105 aa, Artificial Sequence
  Full-Length sequence of the Light Chain of H5S20-10AL as described in Table 3.
QIVLTQSPAIMSASLGEEITLTCSASSSVSYMHWYQQRSGTSPKLLIYSTSNLASGVPSRFSGSGSGTFYSLTISSVEAEDAADYYCHQWSSYRTFGGGTKLEIK

SEQ ID NO: 982 - protein, 105 aa, Artificial Sequence
  Full-Length sequence of the Light Chain of H5S20-15AL as described in Table 3.
QIVLTQSPAIMSASLGEEITLTCSASSSVSYMHWYQQKSGTSPKLLIYSASNLASGVPSRFSGSGSGTFYSLTISSVEAEDAADYYCHQWSSYRTFGGGTKLEIK

SEQ ID NO: 983 - protein, 106 aa, Artificial Sequence
  Full-Length sequence of the Light Chain of H5S20-22AL as described in Table 3.
QIVLTQSPAIMSASLGEEITLTCSASSSVSYMHWYQQKSGSSPKLLIYTTSNLASGVPSRFSGSGSGTFYSLTISSVEAEDAADYYCHQWSSYTWTFGGGTKLEIK

SEQ ID NO: 984 - protein, 108 aa, Artificial Sequence
  Full-Length sequence of the Light Chain of ITI_027L as described in Table 3.
QIVLTQSPAIMSASPGEKVTLTCSASSSVDSSYLFWYQQKPGSSPKLWIYSTSNLASGVPARFSGSGSGTSYSLTISSMEAEDAASYFCHQWSSYPWTFGGGTKLEIK

SEQ ID NO: 985 - protein, 108 aa, Artificial Sequence
  Full-Length sequence of the Light Chain of ITI_028L as described in Table 3.
QIVLTQSPAIMSASPGEKVTLTCSASSSVDSSYLYWYQQKPGSSPKLWIYSTSNLASGVPARFSGSGSGTSYSLTISSMEAEDAASYFCHQWNSYPWTFGGGTKLEIK

SEQ ID NO: 986 - protein, 108 aa, Artificial Sequence
  Full-Length sequence of the Light Chain of ITI_029L as described in Table 3.
QIVLTQSPAIMSASPGEKVTLTCSASSSVDSSYLFWYQQKPGSSPKLWIYSTSNLASGVPARFSGSGSGTSYSLTISSMEAEDAASYFCHQWSSYAWTFGGGTILEIK

SEQ ID NO: 987 - protein, 108 aa, Artificial Sequence
  Full-Length sequence of the Light Chain of ITI_030L as described in Table 3.
QIVLTQSPAIMSASPGEKVTLTCSASSSVDSSYLYWFQQKPGSSPKLWIYGTSNLASGVPVRFSGSGSGTSYSLTISSMEAEDAASYFCHQWNSYPWTFGGGTKLEIK

SEQ ID NO: 988 - protein, 108 aa, Artificial Sequence
  Full-Length sequence of the Light Chain of ITI_033L as described in Table 3.
QIVLTQSPAIMSASPGEKVTLTCSASSSVDSSYLFWYQQKPGSSPKLWIYSTSNLASGVPARFSGSGSGTSYSLTISSMEAEDAASYFCHQWSSYPWTFGGGTMLEIK

SEQ ID NO: 989 - protein, 108 aa, Artificial Sequence
  Full-Length sequence of the Light Chain of ITI_038L as described in Table 3.
QIVLTQSPAIMSASPGEKVTLTCSASSSVDSSYLYWYQQKPGSSPKLWIYGTSNLASGVPVRFSGSGSGTSYSLTISSMEAEDAASYFCHQWNSYPWTFGGGTKLEIK

SEQ ID NO: 990 - protein, 106 aa, Artificial Sequence
  Full-Length sequence of the Light Chain of ITI_127L as described in Table 3.
QIVLTQSPAIMSASLGEEITLTCSARSSVSYMFWYQQKSGTSPKLLIYTTSNLASGVPSRFSGSGSGTFFSLTISGVEAEDAADYYCHQWSSYTWTFGGGTKLEIK

SEQ ID NO: 991 - protein, 106 aa, Artificial Sequence
  Full-Length sequence of the Light Chain of ITI_128L as described in Table 3.
QIVLTQSPAIVSASLGAEITLTCSARSTVSYMFWYQQKSGTSPKLLIYSTSNLASGVPSRFSGSGSGTFYSLTISGVEAEDAADYYCHQWSSYTWTFGGGTKLEIK

SEQ ID NO: 992 - protein, 113 aa, Artificial Sequence
  Full-Length sequence of the Light Chain of H5S14-21AL as described in Table 3.
DIVMSQSPSSLAVSVGEKVTMSCKSSQSLLYSSNQKNYLAWYQQKPGQSPKLLIYWASTRESGVPDRFTGSGSGTDFTLTISSVKAEDLAVYYCQQYYSYPWTFGGGTKLEIK

SEQ ID NO: 993 - protein, 107 aa, Artificial Sequence
  Full-Length sequence of the Light Chain of H5S14-22AL as described in Table 3.
DIQMTQSPSSLSASLGERVSLTCRASQEISGYLSWLQQKPDGTIKRLIYAASTLDSGVPKRFSGSRSGSDYSLTISSLESEDFADYYCLQYASYPFTFGSGTKLEIK

SEQ ID NO: 994 - protein, 107 aa, Artificial Sequence
  Full-Length sequence of the Light Chain of H5S14-23AL as described in Table 3.
DIKMTQSPSSMYASLGERVTITCKASQDINSYLSWFQQKPGKSPKTLIYRANRLVDGVPSRFSGSGSGQDYSLTISSLEYEDMGIYYCLQYDEFPWTFGGGTKLEIK

SEQ ID NO: 995 - protein, 108 aa, Artificial Sequence
  Full-Length sequence of the Light Chain of H5S15-19AL as described in Table 3.
QIVLTQSPAIMSASLGERVTLTCTASSSVSSSYLHWYQQKPGSSPKLWIYDTSNLASGVPARFSGSGSGTSYSLTISSMEAEDAATYYCHQYHRSQWTFGGGTKLEIK

SEQ ID NO: 996 - protein, 113 aa, Artificial Sequence
  Full-Length sequence of the Light Chain of H5S15-21AL as described in Table 3.
DIVMSQSPSSLAVSVGEKVTMSCKSSQSLLYSSNQKNYLAWYQQKPGQSPKLLIYWASTRESGVPDRFTGSGSGTDFTLTISSVKAEDLAVYYCQQYYSYPYTFGGGTKLEIK

SEQ ID NO: 997 - protein, 113 aa, Artificial Sequence
  Full-Length sequence of the Light Chain of H5S15-26AL as described in Table 3.
DIVMSQSPSSLAVSVGEKVTMSCKSSQSLLYSSNQKNYLAWYQQKPGQSPKLLIYWASTRESGVPDRFTGSGSGTDFTLTISSVKAEDLAVYYCQQYYSYPRTFGGGTKLEIK

SEQ ID NO: 998 - protein, 107 aa, Artificial Sequence
  Full-Length sequence of the Light Chain of H5S19-15AL as described in Table 3.
DIKMTQSPSSMYASLGESVTITCKASQDINSYLNWFQQKPGKSPKTLIYRANRLVDGVPSRFSGSGSGQDYSLTISSLEFEDMGIYYCLQYDEFPFTFGSGTKLEMK

SEQ ID NO: 999 - protein, 107 aa, Artificial Sequence
  Full-Length sequence of the Light Chain of H5S19-9BL as described in Table 3.
DIKMTQSPSSMYASLGESVTITCKASQDINSYLSWFQQKPGKSPKTLIYRANRLVDGVPSRFSGSGSGQDYSLTISSLEFEDMGIYYCLQYDEFPFTFGSGTKLEMK

SEQ ID NO: 1000 - protein, 113 aa, Artificial Sequence
  Full-Length sequence of the Light Chain of H5S20-12AL as described in Table 3.
DIVMSQSPSSLAVSVGEKVTMSCKSSQSLLYSSNQKNYLAWYQQKPGQSPKLLIYWASTRESGVPDRFTGSGSGTDFTLTISSVKAEDLAVYYCQQYYSYPFTFGSGTKLEIK

SEQ ID NO: 1001 - protein, 113 aa, Artificial Sequence
  Full-Length sequence of the Light Chain of H5S20-12BL as described in Table 3.
DIVMSQSPSSLAVSVGEKVTMSCKSSQSLLYSSNQKNYLAWYQQRPGQSPKLLIYWASTRESGVPDRFTGSGSGTDFTLTISSVKAEDLAVYYCQQYYSYPFTFGSGTKLEIK

SEQ ID NO: 1002 - protein, 113 aa, Artificial Sequence
  Full-Length sequence of the Light Chain of H5S20-1AL as described in Table 3.
DIVMSQSPSSLAVSVGEKVTMSCKSSQSLLYSSDQKNYLAWYQQKPGQSPKLLIYWASTRESGVPDRFTGSGSGTDFTLTISSVKAEDLAVYYCQQYYSYPFTFGSGTKLEIK

SEQ ID NO: 1003 - protein, 113 aa, Artificial Sequence
  Full-Length sequence of the Light Chain of H5S20-1BL as described in Table 3.
DIVMSQSPSSLGVSVGEKVTMSCKSSQSLLYSSDQKNYLAWYQQKPGQSPKLLIYWASTRESGVPDRFTGSGSGTDFTLTISSVKAEDLAVYYCQQYYSYPFTFGSGTKLEIK

SEQ ID NO: 1004 - protein, 113 aa, Artificial Sequence
  Full-Length sequence of the Light Chain of H5S20-27AL as described in Table 3.
DIVMSQSPSSLAVSVGEKVTMSCKSSQSLLYSSDQKNYLAWYQQKPGQSPKLLIYWASTGESGVPDRFTGSGSGTDFTLTISSVKAEDLAVYYCQQYYSYPFTFGSGTKLEIK

SEQ ID NO: 1005 - protein, 113 aa, Artificial Sequence
  Full-Length sequence of the Light Chain of H5S20-28AL as described in Table 3.
DIVMSQSPSSLAVSVGEKVTMSCKSSQSLLYSSDQKNYLAWYQQKPGQSPKLLIYWASTRGSGVPDRFTGSGSGTDFTLTISSVKAEDLAVYYCQQYYSYPFTFGSGTKLEIK

SEQ ID NO: 1006 - protein, 113 aa, Artificial Sequence
  Full-Length sequence of the Light Chain of H5S20-29AL as described in Table 3.
DIVMSQSPSSLAVSVGEKITMSCKSSQSLLFSSNQKNYLAWYQQKPGQSPKLLIYWASTRESGVPDRFTGSGSGTDFTLTISSVKAEDLAVYYCQQYYSYPFTFGSGTKLEIK

SEQ ID NO: 1007 - protein, 113 aa, Artificial Sequence
  Full-Length sequence of the Light Chain of H5S20-30AL as described in Table 3.
DIVMSQSPSSLPVSVGEKVTMTCKSSQSLLYGSNQKNYLAWYQQKPGQSPKLLIYWASTRESGVPDRFTGSGSGTDFTLTISSVKAEDLAVYYCQQYYSYPFTFGSGTKLEIK

SEQ ID NO: 1008 - protein, 113 aa, Artificial Sequence
  Full-Length sequence of the Light Chain of H5S20-33AL as described in Table 3.
DIVMSQSPSSLAVSVGEKITMSCKSSQSLLFSSNQKNYLAWYQQKPGQSPKLLIYWASTRESGVPDRFTGSGSGTDFTLTISSVKAEDLAVYYCQQYYTYPFTFGSGTKLEMK

SEQ ID NO: 1009 - protein, 113 aa, Artificial Sequence
  Full-Length sequence of the Light Chain of H5S20-42AL as described in Table 3.
DIVMSQSPSSLAVSVGEKITMSCKSSQSLLFGSNQKNYLAWYQQKPGQSPKLLIYWASTRESGVPDRFTGSGSGTDFTLTISSVKAEDLAVYYCQQYYTYPFTFGSGTKLEMK

SEQ ID NO: 1010 - protein, 113 aa, Artificial Sequence
  Full-Length sequence of the Light Chain of H5S20-4AL as described in Table 3.
DIVMSQSPSSLAVSVGEKITMSCKSSQSLLFSSIQKNYLAWYQQKPGQSPKLLVYWASTRESGVPDRFTGSGSGTDFTLTISSVKAEDLAVYYCQQYYSYPFTFGSGTKLEIK

SEQ ID NO: 1011 - protein, 113 aa, Artificial Sequence
  Full-Length sequence of the Light Chain of H5S20-6AL as described in Table 3.
DIVMSQSPSSLAVSVGEKVTMSCKSSQSLLYSSNQKNYLAWYQQKPGQSPKLLIYWSSTRESGVPDRFTGSGSGTDFTLTISSVKAEDLAVYYCQQYYSYPFTFGSGTKLEIK

SEQ ID NO: 1012 - protein, 107 aa, Artificial Sequence
  Full-Length sequence of the Light Chain of ITI_122L as described in Table 3.
QIVLTQSPAIMSASLGERVTMTCTASSSVSSSYLHWYQQKPGSSPKLWIYNTSNLASGVPARFSGSGSGTSFSLTISSMEAEDAATYYCHQYHRSPTFGGGTKLEIK

SEQ ID NO: 1013 - protein, 107 aa, Artificial Sequence
  Full-Length sequence of the Light Chain of ITI_173L as described in Table 3.
DIKMTQSPSSMYASLGESVTITCKASQDINSYLSWFQQKPGKSPKTLIYRANRLVDGVPSRFSGSGSGQDYSLTISSLEFEDMGIYFCLQYDEFPFTFGSGTKLEMK

SEQ ID NO: 1014 - protein, 106 aa, Artificial Sequence
  Full-Length sequence of the Light Chain of ITI_203L as described in Table 3.
DILMTQSPSSMSVSLGDTVNITCHASQGISSNIGWLQQKPGKSFKGLIYHGTNLEDGVPSRFSGSGSGADYSLTISNLESEDFADYYCGQYGQFPPTFGGGTKLEI

SEQ ID NO: 1015 - protein, 112 aa, Artificial Sequence
  Full-Length sequence of the Light Chain of H5S14-10AL as described in Table 3.
DVVMTQTPLSLPVSLGDQASISCRSSQSLVHSNGNTYLHWYLQKPGQSPKLLIYKVSNRFSGVPDRFSGSGSGTDFTLKISRVEAEDLGVYFCSQSIHVPFTFGSGTKLEIK

SEQ ID NO: 1016 - protein, 112 aa, Artificial Sequence
  Full-Length sequence of the Light Chain of H5S14-7AL and H5S15-23AL as described in Table 3.
DVVMTQTPLSLPVSLGDQASISCRSSQSLVHSNGNTYLHWYLQKPGQSPKLLIYKVSNRFSGVPDRFSGSGSGTDFTLKISRVEAEDLGVYFCSQSTHVPFTFGSGTKLEIK

SEQ ID NO: 1017 - protein, 111 aa, Artificial Sequence
  Full-Length sequence of the Light Chain of H5S15-10AL as described in Table 3.
DVVMTQTPLSLPVSLGDQASISCRSSQSLVHTNGNTYLHWYLQKPGQSPRLLIYKVSNRFSGVPDRFSGGGSGTDFTLKISRVEAEDLGVYFCSQSTHVPTFGSGTKLEIK

SEQ ID NO: 1018 - protein, 111 aa, Artificial Sequence
  Full-Length sequence of the Light Chain of H5S15-11AL as described in Table 3.
DVVMTQTPLSLPVSLGDQASVSCRSSQSLVHSNGNTYLHWYLQKPGQSPKLLIYKVSNRFSGVPDRFIGSGSGTDFTLKISRVEAEDLGVYFCSQSTHVPTFGSGTKLEVK

SEQ ID NO: 1019 - protein, 111 aa, Artificial Sequence
  Full-Length sequence of the Light Chain of H5S15-11BL as described in Table 3.
DVVMTQTPLSLSVSLGDQASISCRSSQSLVHSNGNTYLHWYLQKPGQSPKLLIYKVSNRFSGVPDRFSGSGSGTDFTLKISRVEAEDLGVYFCSQSTHVPTFGSGTKLEIK

SEQ ID NO: 1020 - protein, 111 aa, Artificial Sequence
  Full-Length sequence of the Light Chain of H5S15-11CL as described in Table 3.
DVVMTQTPLSLPVSLGDQASISCRSSQSLVHSNGNTYLHWYLQKPGQSPKLMIYKVSNRFSGVPDRFSGSGSGTDFTLRISRVEAEDLGVYFCSQSTHVPTFGSGTKLEIK

SEQ ID NO: 1021 - protein, 111 aa, Artificial Sequence
  Full-Length sequence of the Light Chain of H5S15-11DL as described in Table 3.
DVVMTQTPLSLPVSLGDQASISCRSSQSLVHSNGNTYLHWYLQKPGQSPKLLIYKVSNRFSGVPDRFSGSGSGTDFTLKISRVEAEDLGVYFCSQSTHVPTFGSGTKLEIK

SEQ ID NO: 1022 - protein, 111 aa, Artificial Sequence
  Full-Length sequence of the Light Chain of H5S15-11EL as described in Table 3.
DVVMTQTPLSLPVSLGDQASISCRSSQSLVHSNGNTYLHWYLQKPGQSPKLLIYKVSNRFSGVPDRFSGSGSGTDFTLKISRVETEDLGVYFCSQSTHVPTFGSGTKLEIK

SEQ ID NO: 1023 - protein, 113 aa, Artificial Sequence
  Full-Length sequence of the Light Chain of H5S15-22AL as described in Table 3.
DVVMTQTPLSLPVSLGDQASISCRSSQSLVHSNGNTYLHWYLQKPGQSPKLLIYKVSNRFSGVPDRFSGSGSGTDFTLKISRVEAEDLGVYFCSQSTHVPPWTFGGGTKLEIK

SEQ ID NO: 1024 - protein, 107 aa, Artificial Sequence
  Full-Length sequence of the Light Chain of H5S14-19AL as described in Table 3.
DIQMTQSPASLSVSVGETVTITCRASENIYSNLAWYQQKQGKSPQLLVYAATNLADGVPSRFSGSGSGTQYSLKINSLQSEDFGSYYCQHFWGTPRTFGGGTKLEIK

SEQ ID NO: 1025 - protein, 107 aa, Artificial Sequence
  Full-Length sequence of the Light Chain of H5S14-9AL as described in Table 3.
DIQMTQSPASLSASVGETVTITCRASENIYSYLAWYQQKQGKSPQLLVYNAKTLAEGVPSRFSGSGSGTQFSLKINSLQPEDFGSYYCQHHYGTMYTFGGGTKLEIK

SEQ ID NO: 1026 - protein, 106 aa, Artificial Sequence
  Full-Length sequence of the Light Chain of H5S15-2AL as described in Table 3.
DIQMTQSPASLSASVGETVTITCRASENIYSYLAWYQQKQGKSPQLLVYNAKTLAEGVPSRFSGSGSGTQFSLKINSLQPEDFGSYYCQHHYGTYTFGGGTKLEIK

SEQ ID NO: 1027 - protein, 106 aa, Artificial Sequence
  Full-Length sequence of the Light Chain of H5S15-32AL as described in Table 3.
DIQMTQSPASLSASVGETVTITCRASGNIHNYLAWYQQKQGKSPQLLVYNAKTLADGVPSRFSGSGSGTQYSLKINSLQPEDFGSYYCQHFWSTFTFGSGTKLEIK

SEQ ID NO: 1028 - protein, 106 aa, Artificial Sequence
  Full-Length sequence of the Light Chain of ITI_023L as described in Table 3.
DIQMTQSPASLSASVGETVTITCRASGNIHNYLTWYQQKQGKSPQLLVYNAKTLADGVPSRFSGSGSGTQYSLKINNLQPEDFGSYYCQHFWSTFTFGSGTKLEVK

SEQ ID NO: 1029 - protein, 107 aa, Artificial Sequence
  Full-Length sequence of the Light Chain of ITI_240L as described in Table 3.
DIQMTQSPASLSASVGETVTITCRPSENIYSYLAWYQQKQGKSPQLLVYNAKTLAEGVPSRFSGSGSGTHFSLKINSLQPEEFGSYYCQHHYGTPYTFGGGTKLEIK

SEQ ID NO: 1030 - protein, 107 aa, Artificial Sequence
  Full-Length sequence of the Light Chain of H5S14-12AL as described in Table 3.
ETTVTQSPASLSVATGEKVTIRCITSTDIDDDMNWYQQKPGEPPKLLISEGNTLRPGVPSRFSSSGYGTDFVFTIENTLSEDVADYYCLQSDNMPYTFGGGTKLEIK

SEQ ID NO: 1031 - protein, 112 aa, Artificial Sequence
  Full-Length sequence of the Light Chain of H5S19-22AL as described in Table 3.
DAVMTQTPLSLTVSLGDQASISCRSSQTLENTNGNTYLNWYLQKPGQSPQLLIYRVSNRFSGVLDRFSGSGSGTDFTLKISRVEAEDLGVYFCLQVTHVPYTFGGGTKLEIK

SEQ ID NO: 1032 - protein, 112 aa, Artificial Sequence
  Full-Length sequence of the Light Chain of H5S19-24AL as described in Table 3.
DIVMTQAAFSNPVTLGTSASISCRSSKSLLHSNGITYLYWYLQKPGQSPQLLIYQMSNLASGVPDRFSSSGSGTDFTLRISRVEAEDVGVYYCAQNLELPYTFGGGTKLEIK

SEQ ID NO: 1033 - protein, 26 aa, Artificial Sequence
  Framework Region 1 of the Heavy Chain of Consensus Cluster #6 as described in Table 2.
  misc_feature (1)..(1): Xaa is Aspartate, Asparagine, Serine, Glutamate or Glutamine
  misc_feature (2)..(2): Xaa is Isoleucine, Asparagine or Valine
  misc_feature (3)..(3): Xaa is Valine or Glutamine
  misc_feature (4)..(4): Xaa is Leucine, Methionine or Isoleucine
  misc_feature (7)..(7): Xaa is Serine or Threonine
  misc_feature (8)..(8): Xaa is Proline, Glutamine, Threonine or Serine
  misc_feature (9)..(9): Xaa is Alanine, Serine, Lysine or Threonine
  misc_feature (10)..(10): Xaa is Serine, Threonine, Phenylalanine, Isoleucine, Tyrosine or Leucine
  misc_feature (11)..(11): Xaa is Leucine, Methionine or Glutamine
  misc_feature (12)..(12): Xaa is Alanine, Serine, Threonine or Leucine
  misc_feature (13)..(13): Xaa is Valine, Alanine or Threonine
  misc_feature (14)..(14): Xaa is Serine, Threonine or Proline
  misc_feature (15)..(15): Xaa is Leucine, Proline, Alanine or Valine
  misc_feature (17)..(17): Xaa is Glutamine, Aspartate, Glutamate or Glycine
  misc_feature (18)..(18): Xaa is Arginine, Lysine, Threonine or Serine
  misc_feature (19)..(19): Xaa is Alanine, Valine or Isoleucine
  misc_feature (20)..(20): Xaa is Threonine or Serine
  misc_feature (21)..(21): Xaa is Isoleucine, Leucine, Methionine or Valine
  misc_feature (22)..(22): Xaa is Serine, Threonine or Asparagine
  misc_feature (24)..(24): Xaa is Lysine, Arginine, Serine, Threonine or Leucine
  misc_feature (25)..(25): Xaa is Alanine, Serine, Threonine or Valine
XXXXTQXXXXXXXXXGXXXXXXCXXS

SEQ ID NO: 1034 - protein, 26 aa, Artificial Sequence
  Framework Region 1 of the Heavy Chain of multiple antibodies as described in Table 2.
SIVMTQTPKFLLVSAGDRVTITCKAS

SEQ ID NO: 1035 - protein, 26 aa, Artificial Sequence
  Framework Region 1 of the Heavy Chain of multiple antibodies as described in Table 2.
QIVLTQSPAIMSASPGEKVTMTCSAS

SEQ ID NO: 1036 - protein, 26 aa, Artificial Sequence
  Framework Region 1 of the Heavy Chain of H5S14-1AL as described in Table 2.
DVQITQSPSYLAASPGETITINCRAS

SEQ ID NO: 1037 - protein, 26 aa, Artificial Sequence
  Framework Region 1 of the Heavy Chain of multiple antibodies as described in Table 2.
NIVLTQSPASLAVSLGQRATISCRAS

SEQ ID NO: 1038 - protein, 26 aa, Artificial Sequence
  Framework Region 1 of the Heavy Chain of H5S14-25AL as described in Table 2.
DIQMTQSSSYLSVSLGGRVTITCKAS

SEQ ID NO: 1039 - protein, 26 aa, Artificial Sequence
  Framework Region 1 of the Heavy Chain of multiple antibodies as described in Table 2.
QIVLTQSPAIMSASPGEKVTISCSAS

SEQ ID NO: 1040 - protein, 26 aa, Artificial Sequence
  Framework Region 1 of the Heavy Chain of H5S14-6AL as described in Table 2.
DIQMTQSPASQSASLGESVTITCLAS

SEQ ID NO: 1041 - protein, 26 aa, Artificial Sequence
  Framework Region 1 of the Heavy Chain of multiple antibodies as described in Table 2.
DIVLTQSPASLAVSLGQRATISCKAS

SEQ ID NO: 1042 - protein, 26 aa, Artificial Sequence
  Framework Region 1 of the Heavy Chain of multiple antibodies as described in Table 2.
DIVMTQSQKFMSTSVGDRVSVTCKAS

SEQ ID NO: 1043 - protein, 26 aa, Artificial Sequence
  Framework Region 1 of the Heavy Chain of H5S15-18AL as described in Table 2.
ENVLTQSPAIMSASPGEKVTMTCRAS

SEQ ID NO: 1044 - protein, 26 aa, Artificial Sequence
  Framework Region 1 of the Heavy Chain of H5S15-28AL as described in Table 2.
DIQMTQTTSSLSVSLGDRVTISCRAS

SEQ ID NO: 1045 - protein, 26 aa, Artificial Sequence
  Framework Region 1 of the Heavy Chain of H5S15-29AL as described in Table 2.
EIVLTQSPALMTASPGEKVTITCSVS

SEQ ID NO: 1046 - protein, 26 aa, Artificial Sequence
  Framework Region 1 of the Heavy Chain of multiple antibodies as described in Table 2.
EIVLTQSPALMAASPGEKVTITCSVS

SEQ ID NO: 1047 - protein, 26 aa, Artificial Sequence
  Framework Region 1 of the Heavy Chain of multiple antibodies as described in Table 2.
DIQMTQTTSSLSASLGDRVTISCSAS

SEQ ID NO: 1048 - protein, 26 aa, Artificial Sequence
  Framework Region 1 of the Heavy Chain of multiple antibodies as described in Table 2.
DIQMTQTTSSLSASLGDRVTISCTAS

SEQ ID NO: 1049 - protein, 26 aa, Artificial Sequence
  Framework Region 1 of the Heavy Chain of H5S19-8AL as described in Table 2.
DVQITQSPSYLAASPGETITINCRTS

SEQ ID NO: 1050 - protein, 26 aa, Artificial Sequence
  Framework Region 1 of the Heavy Chain of multiple antibodies as described in Table 2.
QIVLTQSPALMSASPGEKVTMTCSAS

SEQ ID NO: 1051 - protein, 26 aa, Artificial Sequence
  Framework Region 1 of the Heavy Chain of H5S20-17AL as described in Table 2.
DIVMTQSPATLSVTPGDRVSLSCRAS

SEQ ID NO: 1052 - protein, 26 aa, Artificial Sequence
  Framework Region 1 of the Heavy Chain of H5S20-23AL as described in Table 2.
DIVMTQSPSSLTVPAGEKVTMSCKSS

SEQ ID NO: 1053 - protein, 26 aa, Artificial Sequence
  Framework Region 1 of the Heavy Chain of H5S20-34AL as described in Table 2.
QIVLTQSPALMSASPGEKVTMTCTAS

SEQ ID NO: 1054 - protein, 26 aa, Artificial Sequence
  Framework Region 1 of the Heavy Chain of ITI_045L as described in Table 2.
EIVLTQSPTTMAASPGEKITITCSAS

SEQ ID NO: 1055 - protein, 26 aa, Artificial Sequence
  Framework Region 1 of the Heavy Chain of multiple antibodies as described in Table 2.
ENVLTQSPAIMSASLGEKVTMSCRAS

SEQ ID NO: 1056 - protein, 26 aa, Artificial Sequence
  Framework Region 1 of the Heavy Chain of multiple antibodies as described in Table 2.
DIQMTQTPSSLSASLGDRVTISCSAS

SEQ ID NO: 1057 - protein, 26 aa, Artificial Sequence
  Framework Region 1 of the Heavy Chain of ITI_236L as described in Table 2.
DIQMTQTTSSLSASLGDRVTISCRAS

SEQ ID NO: 1058 - protein, 26 aa, Artificial Sequence
  Framework Region 1 of the Heavy Chain of Consensus Cluster #7 as described in Table 2.
  misc_feature (1)..(1): Xaa is Aspartate or Glutamate
  misc_feature (2)..(2): Xaa is Valine or Asparagine
  misc_feature (3)..(3): Xaa is Valine or Leucine
  misc_feature (4)..(4): Xaa is Methionine or Leucine
  misc_feature (7)..(7): Xaa is Threonine or Serine
  misc_feature (9)..(9): Xaa is Leucine or Alanine
  misc_feature (10)..(10): Xaa is Threonine, Isoleucine or Serine
  misc_feature (11)..(11): Xaa is Leucine or Methionine
  misc_feature (12)..(12): Xaa is Serine, Proline or Threonine
  misc_feature (13)..(13): Xaa is Valine, Alanine or Isoleucine
  misc_feature (14)..(14): Xaa is Threonine, Serine or Asparagine
  misc_feature (15)..(15): Xaa is Isoleucine, Proline, Leucine or Valine
  misc_feature (17)..(17): Xaa is Glutamine, Glutamate, Aspartate or Histidine
  misc_feature (18)..(18): Xaa is Proline, Lysine, Glutamine or Threonine
  misc_feature (19)..(19): Xaa is Alanine or Valine
  misc_feature (20)..(20): Xaa is Serine or Threonine
  misc_feature (21)..(21): Xaa is Isoleucine or Methionine
  misc_feature (22)..(22): Xaa is Serine or Threonine
  misc_feature (24)..(24): Xaa is Lysine, Serine or Arginine
  misc_feature (25)..(25): Xaa is Serine or Alanine
  misc_feature (26)..(26): Xaa is Serine or Glycine
XXXXTQXPXXXXXXXGXXXXXXCXXX

SEQ ID NO: 1059 - protein, 26 aa, Artificial Sequence
  Framework Region 1 of the Heavy Chain of multiple antibodies as described in Table 2.
DVVMTQTPLTLSVTIGQPASISCKSS

SEQ ID NO: 1060 - protein, 26 aa, Artificial Sequence
  Framework Region 1 of the Heavy Chain of multiple antibodies as described in Table 2.
DVLMTQTPLSLPVSLGDQASISCRSS

SEQ ID NO: 1061 - protein, 26 aa, Artificial Sequence
  Framework Region 1 of the Heavy Chain of H5S15-17AL as described in Table 2.
DVVMTQTPLTLSVTVGQPASISCKSS

SEQ ID NO: 1062 - protein, 26 aa, Artificial Sequence
  Framework Region 1 of the Heavy Chain of H5S15-1AL as described in Table 2.
ENVLTQSPAIMSASPGEKVTMTCSAG

SEQ ID NO: 1063 - protein, 26 aa, Artificial Sequence
  Framework Region 1 of the Heavy Chain of H5S15-3BL as described in Table 2.
DVLMTQTPLSLTVSLGHQASISCRSS

SEQ ID NO: 1064 - protein, 26 aa, Artificial Sequence
  Framework Region 1 of the Heavy Chain of H5S20-19BL as described in Table 2.
DVVMTQTPLSLSVTIGQPASISCKSS

SEQ ID NO: 1065 - protein, 26 aa, Artificial Sequence
  Framework Region 1 of the Heavy Chain of H5S20-39AL as described in Table 2.
DVLMTQTPLSLPVSLGDQVSISCRSS

SEQ ID NO: 1066 - protein, 26 aa, Artificial Sequence
  Framework Region 1 of the Heavy Chain of H5S20-7CL as described in Table 2.
DVVMTQTPLTLSITIGQPASISCKSS

SEQ ID NO: 1067 - protein, 26 aa, Artificial Sequence
  Framework Region 1 of the Heavy Chain of H5S20-7EL as described in Table 2.
DVVMTQTPLTLSVTIGQTASISCKSS

SEQ ID NO: 1068 - protein, 26 aa, Artificial Sequence
  Framework Region 1 of the Heavy Chain of H5S20-9AL as described in Table 2.
DVLMTQTPLSLPVNLGDQASISCRSS

SEQ ID NO: 1069 - protein, 26 aa, Artificial Sequence
  Framework Region 1 of the Heavy Chain of Consensus Cluster #3 as described in Table 2.
  misc_feature (11)..(11): Xaa is Methionine, Valine or Isoleucine
  misc_feature (13)..(13): Xaa is Alanine or Threonine
  misc_feature (15)..(15): Xaa is Leucine or Proline
  misc_feature (17)..(17): Xaa is Glutamate or Alanine
  misc_feature (18)..(18): Xaa is Glutamate or Lysine
  misc_feature (19)..(19): Xaa is Isoleucine or Valine
  misc_feature (26)..(26): Xaa is Serine or Arginine
QIVLTQSPAIXSXSXGXXXTLTCSAX

SEQ ID NO: 1070 - protein, 26 aa, Artificial Sequence
  Framework Region 1 of the Heavy Chain of multiple antibodies as described in Table 2.
QIVLTQSPAIMSASLGEEITLTCSAS

SEQ ID NO: 1071 - protein, 26 aa, Artificial Sequence
  Framework Region 1 of the Heavy Chain of H5S14-5AL as described in Table 2.
QIVLTQSPAIISASLGEEVTLTCSAS

SEQ ID NO: 1072 - protein, 26 aa, Artificial Sequence
  Framework Region 1 of the Heavy Chain of multiple antibodies as described in Table 2.
QIVLTQSPAIMSASPGEKVTLTCSAS

SEQ ID NO: 1073 - protein, 26 aa, Artificial Sequence
  Framework Region 1 of the Heavy Chain of H5S19-18AL as described in Table 2.
QIVLTQSPAIMSTSPGEKVTLTCSAS

SEQ ID NO: 1074 - protein, 26 aa, Artificial Sequence
  Framework Region 1 of the Heavy Chain of ITI_127L as described in Table 2.
QIVLTQSPAIMSASLGEEITLTCSAR

SEQ ID NO: 1075 - protein, 26 aa, Artificial Sequence
  Framework Region 1 of the Heavy Chain of ITI_128L as described in Table 2.
QIVLTQSPAIVSASLGAEITLTCSAR

SEQ ID NO: 1076 - protein, 26 aa, Artificial Sequence
  Framework Region 1 of the Heavy Chain of Consensus Cluster #5 as described in Table 2.
  misc_feature (1)..(1): Xaa is Glutamine or Aspartate
  misc_feature (3)..(3): Xaa is Valine, Glutamine, Leucine or Lysine
  misc_feature (4)..(4): Xaa is Leucine or Methionine
  misc_feature (5)..(5): Xaa is Threonine or Serine
  misc_feature (9)..(9): Xaa is Alanine or Serine
  misc_feature (10)..(10): Xaa is Isoleucine or Serine
  misc_feature (11)..(11): Xaa is Methionine or Leucine
  misc_feature (12)..(12): Xaa is Serine, Alanine, Proline, Glycine or Tyrosine
  misc_feature (13)..(13): Xaa is Alanine or Valine
  misc_feature (15)..(15): Xaa is Leucine or Valine
  misc_feature (17)..(17): Xaa is Glutamate or Aspartate
  misc_feature (18)..(18): Xaa is Arginine, Lysine, Threonine or Serine
  misc_feature (19)..(19): Xaa is Valine or Isoleucine
  misc_feature (20)..(20): Xaa is Threonine, Serine or Asparagine
  misc_feature (21)..(21): Xaa is Methionine, Leucine or Isoleucine
  misc_feature (22)..(22): Xaa is Threonine or Serine
  misc_feature (24)..(24): Xaa is Threonine, Arginine, Lysine or Histidine
  misc_feature (25)..(25): Xaa is Alanine or Serine
XIXXXQSPXXXXXSXGXXXXXXCXXS

SEQ ID NO: 1077 - protein, 26 aa, Artificial Sequence
  Framework Region 1 of the Heavy Chain of multiple antibodies as described in Table 2.
DIVMSQSPSSLAVSVGEKVTMSCKSS

SEQ ID NO: 1078 - protein, 26 aa, Artificial Sequence
  Framework Region 1 of the Heavy Chain of H5S14-22AL as described in Table 2.
DIQMTQSPSSLSASLGERVSLTCRAS

SEQ ID NO: 1079 - protein, 26 aa, Artificial Sequence
  Framework Region 1 of the Heavy Chain of H5S14-23AL as described in Table 2.
DIKMTQSPSSMYASLGERVTITCKAS

SEQ ID NO: 1080 - protein, 26 aa, Artificial Sequence
  Framework Region 1 of the Heavy Chain of H5S15-19AL as described in Table 2.
QIVLTQSPAIMSASLGERVTLTCTAS

SEQ ID NO: 1081 - protein, 26 aa, Artificial Sequence
  Framework Region 1 of the Heavy Chain of multiple antibodies as described in Table 2.
DIKMTQSPSSMYASLGESVTITCKAS

SEQ ID NO: 1082 - protein, 26 aa, Artificial Sequence
  Framework Region 1 of the Heavy Chain of H5S20-1BL as described in Table 2.
DIVMSQSPSSLGVSVGEKVTMSCKSS

SEQ ID NO: 1083 - protein, 26 aa, Artificial Sequence
  Framework Region 1 of the Heavy Chain of multiple antibodies as described in Table 2.
DIVMSQSPSSLAVSVGEKITMSCKSS

SEQ ID NO: 1084 - protein, 26 aa, Artificial Sequence
  Framework Region 1 of the Heavy Chain of H5S20-30AL as described in Table 2.
DIVMSQSPSSLPVSVGEKVTMTCKSS

SEQ ID NO: 1085 - protein, 26 aa, Artificial Sequence
  Framework Region 1 of the Heavy Chain of ITI_122L as described in Table 2.
QIVLTQSPAIMSASLGERVTMTCTAS

SEQ ID NO: 1086 - protein, 26 aa, Artificial Sequence
  Framework Region 1 of the Heavy Chain of ITI_203L as described in Table 2.
DILMTQSPSSMSVSLGDTVNITCHAS

SEQ ID NO: 1087 - protein, 26 aa, Artificial Sequence
  Framework Region 1 of the Heavy Chain of Consensus Cluster #1 as described in Table 2.
  misc_feature (12)..(12): Xaa is Proline or Serine
  misc_feature (21)..(21): Xaa is Isoleucine or Valine
DVVMTQTPLSLXVSLGDQASXSCRSS

SEQ ID NO: 1088 - protein, 26 aa, Artificial Sequence
  Framework Region 1 of the Heavy Chain of multiple antibodies as described in Table 2.
DVVMTQTPLSLPVSLGDQASISCRSS

SEQ ID NO: 1089 - protein, 26 aa, Artificial Sequence
  Framework Region 1 of the Heavy Chain of H5S15-11AL as described in Table 2.
DVVMTQTPLSLPVSLGDQASVSCRSS

SEQ ID NO: 1090 - protein, 26 aa, Artificial Sequence
  Framework Region 1 of the Heavy Chain of H5S15-11BL as described in Table 2.
DVVMTQTPLSLSVSLGDQASISCRSS

SEQ ID NO: 1091 - protein, 26 aa, Artificial Sequence
  Framework Region 1 of the Heavy Chain of Consensus Cluster #4 as described in Table 2.
  misc_feature (13)..(13): Xaa is Alanine or Valine
  misc_feature (25)..(25): Xaa is Alanine or Proline
DIQMTQSPASLSXSVGETVTITCRXS

SEQ ID NO: 1092 - protein, 26 aa, Artificial Sequence
  Framework Region 1 of the Heavy Chain of H5S14-19AL as described in Table 2.
DIQMTQSPASLSVSVGETVTITCRAS

SEQ ID NO: 1093 - protein, 26 aa, Artificial Sequence
  Framework Region 1 of the Heavy Chain of multiple antibodies as described in Table 2.
DIQMTQSPASLSASVGETVTITCRAS

SEQ ID NO: 1094 - protein, 26 aa, Artificial Sequence
  Framework Region 1 of the Heavy Chain of ITI_240L as described in Table 2.
DIQMTQSPASLSASVGETVTITCRPS

SEQ ID NO: 1095 - protein, 26 aa, Artificial Sequence
  Framework Region 1 of the Heavy Chain of Consensus Cluster #2 as described in Table 2.
  misc_feature (1)..(1): Xaa is Aspartate or Glutamate
  misc_feature (2)..(2): Xaa is Isoleucine, Threonine or Alanine
  misc_feature (3)..(3): Xaa is Valine or Threonine
  misc_feature (4)..(4): Xaa is Methionine or Valine
  misc_feature (7)..(7): Xaa is Alanine, Serine or Threonine
  misc_feature (8)..(8): Xaa is Alanine or Proline
  misc_feature (9)..(9): Xaa is Phenylalanine, Alanine or Leucine
  misc_feature (11)..(11): Xaa is Asparagine or Leucine
  misc_feature (12)..(12): Xaa is Proline, Serine or Threonine
  misc_feature (14)..(14): Xaa is Threonine, Alanine or Serine
  misc_feature (15)..(15): Xaa is Leucine or Threonine
  misc_feature (17)..(17): Xaa is Threonine, Glutamate or Aspartate
  misc_feature (18)..(18): Xaa is Serine, Lysine or Glutamine
  misc_feature (19)..(19): Xaa is Alanine or Valine
  misc_feature (20)..(20): Xaa is Serine or Threonine
  misc_feature (22)..(22): Xaa is Serine or Arginine
  misc_feature (24)..(24): Xaa is Arginine or Isoleucine
  misc_feature (25)..(25): Xaa is Serine or Threonine
XXXXTQXXXSXXVXXGXXXXIXCXXS

SEQ ID NO: 1096 - protein, 26 aa, Artificial Sequence
  Framework Region 1 of the Heavy Chain of H5S14-12AL as described in Table 2.
ETTVTQSPASLSVATGEKVTIRCITS

SEQ ID NO: 1097 - protein, 26 aa, Artificial Sequence
  Framework Region 1 of the Heavy Chain of H5S19-22AL as described in Table 2.
DAVMTQTPLSLTVSLGDQASISCRSS

SEQ ID NO: 1098 - protein, 26 aa, Artificial Sequence
  Framework Region 1 of the Heavy Chain of H5S19-24AL as described in Table 2.
DIVMTQAAFSNPVTLGTSASISCRSS

SEQ ID NO: 1099 - protein, 12 aa, Artificial Sequence
  CDR1 of the Heavy Chain of Consensus Cluster #6 as described in Table 2.
  misc_feature (1)..(1): Xaa is Glutamine, Glutamate, Arginine, Serine, Lysine or Aspartate
  misc_feature (2)..(2): Xaa is Serine, Threonine, Asparagine, Aspartate, Glycine or Histidine
  misc_feature (3)..(3): Xaa is Valine, Isoleucine or Leucine
  misc_feature (4)..(4): Xaa is Aspartate, no amino acid, Leucine, Serine, Asparagine or Arginine
  misc_feature (5)..(5): Xaa is Tyrosine, Serine, no amino acid or Asparagine
  misc_feature (6)..(6): Xaa is no amino acid or Serine
  misc_feature (7)..(7): Xaa is no amino acid or Glutamate
  misc_feature (8)..(8): Xaa is Aspartate, Tyrosine, no amino acid or Asparagine
  misc_feature (9)..(9): Xaa is Glycine, no amino acid or Glutamine
  misc_feature (10)..(10): Xaa is Aspartate, Asparagine, Glutamate, Serine, Lysine, no amino acid, Glycine, Threonine or Arginine
  misc_feature (11)..(11): Xaa is Serine, Aspartate, Asparagine, Lysine, Arginine or Threonine
  misc_feature (12)..(12): Xaa is Tyrosine, Phenylalanine, Leucine, Aspartate, Asparagine or Tryptophan
XXXXXXXXXXXX

SEQ ID NO: 1100 - protein, 6 aa, Artificial Sequence
  CDR1 of the Heavy Chain of multiple antibodies as described in Table 2.
QSVSND

SEQ ID NO: 1101 - protein, 5 aa, Artificial Sequence
  CDR1 of the Heavy Chain of multiple antibodies as described in Table 2.
SSVSY

SEQ ID NO: 1102 - protein, 6 aa, Artificial Sequence
  CDR1 of the Heavy Chain of H5S14-1AL as described in Table 2.
KSISKY

SEQ ID NO: 1103 - protein, 10 aa, Artificial Sequence
  CDR1 of the Heavy Chain of multiple antibodies as described in Table 2.
ESVDSYGNSF

SEQ ID NO: 1104 - protein, 6 aa, Artificial Sequence
  CDR1 of the Heavy Chain of H5S14-25AL as described in Table 2.
DHINNW

SEQ ID NO: 1105 - protein, 6 aa, Artificial Sequence
  CDR1 of the Heavy Chain of H5S14-6AL as described in Table 2.
QTIGTW

SEQ ID NO: 1106 - protein, 10 aa, Artificial Sequence
  CDR1 of the Heavy Chain of multiple antibodies as described in Table 2.
QSVDYDGESY

SEQ ID NO: 1107 - protein, 6 aa, Artificial Sequence
  CDR1 of the Heavy Chain of multiple antibodies as described in Table 2.
QNVGTN

SEQ ID NO: 1108 - protein, 7 aa, Artificial Sequence
  CDR1 of the Heavy Chain of multiple antibodies as described in Table 2.
SSVSSSY

SEQ ID NO: 1109 - protein, 10 aa, Artificial Sequence
  CDR1 of the Heavy Chain of multiple antibodies as described in Table 2.
QSVDYDGNSY

SEQ ID NO: 1110 - protein, 6 aa, Artificial Sequence
  CDR1 of the Heavy Chain of multiple antibodies as described in Table 2.
QDISNY

SEQ ID NO: 1111 - protein, 7 aa, Artificial Sequence
  CDR1 of the Heavy Chain of H5S15-29AL as described in Table 2.
STISSRN

SEQ ID NO: 1112 - protein, 7 aa, Artificial Sequence
  CDR1 of the Heavy Chain of H5S15-4AL as described in Table 2.
SGIRSSN

SEQ ID NO: 1113 - protein, 7 aa, Artificial Sequence
  CDR1 of the Heavy Chain of multiple antibodies as described in Table 2.
SSISSSN

SEQ ID NO: 1114 - protein, 6 aa, Artificial Sequence
  CDR1 of the Heavy Chain of multiple antibodies as described in Table 2.
QGISNY

SEQ ID NO: 1115 - protein, 10 aa, Artificial Sequence
  CDR1 of the Heavy Chain of H5S19-1AL as described in Table 2.
ESVDSYGNSL

SEQ ID NO: 1116 - protein, 6 aa, Artificial Sequence
  CDR1 of the Heavy Chain of multiple antibodies as described in Table 2.
QGINNY

SEQ ID NO: 1117 - protein, 6 aa, Artificial Sequence
  CDR1 of the Heavy Chain of H5S19-8AL as described in Table 2.
KNISKY

SEQ ID NO: 1118 - protein, 5 aa, Artificial Sequence
  CDR1 of the Heavy Chain of multiple antibodies as described in Table 2.
SSVSF

SEQ ID NO: 1119 - protein, 6 aa, Artificial Sequence
  CDR1 of the Heavy Chain of H5S20-17AL as described in Table 2.
RTISDY

SEQ ID NO: 1120 - protein, 10 aa, Artificial Sequence
  CDR1 of the Heavy Chain of H5S20-20AL as described in Table 2.
QSVDYDGDSF

SEQ ID NO: 1121 - protein, 12 aa, Artificial Sequence
  CDR1 of the Heavy Chain of H5S20-23AL as described in Table 2.
QSLLNSENQKNY

SEQ ID NO: 1122 - protein, 10 aa, Artificial Sequence
  CDR1 of the Heavy Chain of multiple antibodies as described in Table 2.
QSVDYDGDSY

SEQ ID NO: 1123 - protein, 5 aa, Artificial Sequence
  CDR1 of the Heavy Chain of ITI_040L as described in Table 2.
SSISY

SEQ ID NO: 1124 - protein, 7 aa, Artificial Sequence
  CDR1 of the Heavy Chain of ITI_045L as described in Table 2.
SSINSNY

SEQ ID NO: 1125 - protein, 5 aa, Artificial Sequence
  CDR1 of the Heavy Chain of multiple antibodies as described in Table 2.
SSVNY

SEQ ID NO: 1126 - protein, 6 aa, Artificial Sequence
  CDR1 of the Heavy Chain of multiple antibodies as described in Table 2.
QDINNY

SEQ ID NO: 1127 - protein, 6 aa, Artificial Sequence
  CDR1 of the Heavy Chain of ITI_146L as described in Table 2.
QGIRNY

SEQ ID NO: 1128 - protein, 6 aa, Artificial Sequence
  CDR1 of the Heavy Chain of ITI_169L as described in Table 2.
QGITKY

SEQ ID NO: 1129 - protein, 11 aa, Artificial Sequence
  CDR1 of the Heavy Chain of Consensus Cluster #7 as described in Table 2.
  misc_feature (1)..(1): Xaa is Glutamine or Serine
  misc_feature (2)..(2): Xaa is Serine or Asparagine
  misc_feature (3)..(3): Xaa is Leucine, Valine or Isoleucine
  misc_feature (4)..(4): Xaa is Leucine, no amino acid or Valine
  misc_feature (5)..(5): Xaa is Tyrosine, no amino acid, Histidine or Aspartate
  misc_feature (6)..(6): Xaa is Serine or no amino acid
  misc_feature (7)..(7): Xaa is Asparagine, no amino acid or Aspartate
  misc_feature (8)..(8): Xaa is Glycine or no amino acid
  misc_feature (9)..(9): Xaa is Lysine, no amino acid, Asparagine or Isoleucine
  misc_feature (10)..(10): Xaa is Threonine or Serine
XXXXXXXXXXY

SEQ ID NO: 1130 - protein, 11 aa, Artificial Sequence
  CDR1 of the Heavy Chain of multiple antibodies as described in Table 2.
QSLLDSDGKTY

SEQ ID NO: 1131 - protein, 11 aa, Artificial Sequence
  CDR1 of the Heavy Chain of multiple antibodies as described in Table 2.
QSIVHSNGNTY

SEQ ID NO: 1132 - protein, 11 aa, Artificial Sequence
  CDR1 of the Heavy Chain of H5S15-16AL as described in Table 2.
QSIVHSNGITY

SEQ ID NO: 1133 - protein, 5 aa, Artificial Sequence
  CDR1 of the Heavy Chain of H5S15-1AL as described in Table 2.
SSVSY

SEQ ID NO: 1134 - protein, 11 aa, Artificial Sequence
  CDR1 of the Heavy Chain of H5S20-39AL as described in Table 2.
QNIVHSNGNTY

SEQ ID NO: 1135 - protein, 11 aa, Artificial Sequence
  CDR1 of the Heavy Chain of H5S20-41AL as described in Table 2.
QSLLYSNGKTY

SEQ ID NO: 1136 - protein, 7 aa, Artificial Sequence
  CDR1 of the Heavy Chain of Consensus Cluster #3 as described in Table 2.
  misc_feature (2)..(2): Xaa is Serine or Threonine
  misc_feature (4)..(4): Xaa is no amino acid, Aspartate or Serine
  misc_feature (5)..(5): Xaa is no amino acid or Serine
  misc_feature (7)..(7): Xaa is Tyrosine or Phenylalanine
SXVXXSX

SEQ ID NO: 1137 - protein, 5 aa, Artificial Sequence
  CDR1 of the Heavy Chain of multiple antibodies as described in Table 2.
SSVSY

SEQ ID NO: 1138 - protein, 5 aa, Artificial Sequence
  CDR1 of the Heavy Chain of H5S15-8AL as described in Table 2.
SSVSF

SEQ ID NO: 1139 - protein, 7 aa, Artificial Sequence
  CDR1 of the Heavy Chain of multiple antibodies as described in Table 2.
SSVDSSY

SEQ ID NO: 1140 - protein, 7 aa, Artificial Sequence
  CDR1 of the Heavy Chain of multiple antibodies as described in Table 2.
SSVSSSY

SEQ ID NO: 1141 - protein, 5 aa, Artificial Sequence
  CDR1 of the Heavy Chain of ITI_128L as described in Table 2.
STVSY

SEQ ID NO: 1142 - protein, 12 aa, Artificial Sequence
  CDR1 of the Heavy Chain of Consensus Cluster #5 as described in Table 2.
  misc_feature (1)..(1): Xaa is Serine or Glutamine
  misc_feature (2)..(2): Xaa is Serine, Glutamate, Glycine or Aspartate
  misc_feature (3)..(3): Xaa is Valine, Isoleucine or Leucine
  misc_feature (4)..(4): Xaa is Serine, no amino acid or Leucine
  misc_feature (5)..(5): Xaa is no amino acid, Phenylalanine or Tyrosine
  misc_feature (6)..(6): Xaa is no amino acid, Glycine or Serine
  misc_feature (7)..(7): Xaa is no amino acid or Serine
  misc_feature (8)..(8): Xaa is no amino acid, Asparagine, Aspartate or Isoleucine
  misc_feature (9)..(9): Xaa is no amino acid or Glutamine
  misc_feature (10)..(10): Xaa is Serine, Lysine or Asparagine
  misc_feature (11)..(11): Xaa is Serine, Glycine or Asparagine
  misc_feature (12)..(12): Xaa is Tyrosine or Asparagine
XXXXXXXXXXXX

SEQ ID NO: 1143 - protein, 12 aa, Artificial Sequence
  CDR1 of the Heavy Chain of multiple antibodies as described in Table 2.
QSLLYSSNQKNY

SEQ ID NO: 1144 - protein, 6 aa, Artificial Sequence
  CDR1 of the Heavy Chain of H5S14-22AL as described in Table 2.
QEISGY

SEQ ID NO: 1145 - protein, 6 aa, Artificial Sequence
  CDR1 of the Heavy Chain of multiple antibodies as described in Table 2.
QDINSY

SEQ ID NO: 1146 - protein, 12 aa, Artificial Sequence
  CDR1 of the Heavy Chain of multiple antibodies as described in Table 2.
QSLLYSSDQKNY

SEQ ID NO: 1147 - protein, 12 aa, Artificial Sequence
  CDR1 of the Heavy Chain of multiple antibodies as described in Table 2.
QSLLFSSNQKNY

SEQ ID NO: 1148 - protein, 12 aa, Artificial Sequence
  CDR1 of the Heavy Chain of H5S20-30AL as described in Table 2.
QSLLYGSNQKNY

SEQ ID NO: 1149 - protein, 12 aa, Artificial Sequence
  CDR1 of the Heavy Chain of H5S20-42AL as described in Table 2.
QSLLFGSNQKNY

SEQ ID NO: 1150 - protein, 12 aa, Artificial Sequence
  CDR1 of the Heavy Chain of H5S20-4AL as described in Table 2.
QSLLFSSIQKNY

SEQ ID NO: 1151 - protein, 6 aa, Artificial Sequence
  CDR1 of the Heavy Chain of ITI_203L as described in Table 2.
QGISSN

SEQ ID NO: 1152 - protein, 11 aa, Artificial Sequence
  CDR1 of the Heavy Chain of Consensus Cluster #1 as described in Table 2.
  misc_feature (6)..(6): Xaa is Serine or Threonine
QSLVHXNGNTY

SEQ ID NO: 1153 - protein, 11 aa, Artificial Sequence
  CDR1 of the Heavy Chain of multiple antibodies as described in Table 2.
QSLVHSNGNTY

SEQ ID NO: 1154 - protein, 11 aa, Artificial Sequence
  CDR1 of the Heavy Chain of H5S15-10AL as described in Table 2.
QSLVHTNGNTY

SEQ ID NO: 1155 - protein, 6 aa, Artificial Sequence
  CDR1 of the Heavy Chain of Consensus Cluster #4 as described in Table 2.
  misc_feature (1)..(1): Xaa is Glutamate or Glycine
  misc_feature (4)..(4): Xaa is Tyrosine or Histidine
  misc_feature (5)..(5): Xaa is Serine or Asparagine
  misc_feature (6)..(6): Xaa is Tyrosine or Asparagine
XNIXXX

SEQ ID NO: 1156 - protein, 6 aa, Artificial Sequence
  CDR1 of the Heavy Chain of H5S14-19AL as described in Table 2.
ENIYSN

SEQ ID NO: 1157 - protein, 6 aa, Artificial Sequence
  CDR1 of the Heavy Chain of multiple antibodies as described in Table 2.
ENIYSY

SEQ ID NO: 1158 - protein, 6 aa, Artificial Sequence
  CDR1 of the Heavy Chain of multiple antibodies as described in Table 2.
GNIHNY

SEQ ID NO: 1159 - protein, 11 aa, Artificial Sequence
  CDR1 of the Heavy Chain of Consensus Cluster #2 as described in Table 2.
  misc_feature (1)..(1): Xaa is Lysine, Threonine or Glutamine
  misc_feature (2)..(2): Xaa is Serine, Aspartate or Threonine
  misc_feature (3)..(3): Xaa is Leucine or Isoleucine
  misc_feature (4)..(4): Xaa is Leucine, no amino acid or Glutamate
  misc_feature (5)..(5): Xaa is Histidine, no amino acid or Asparagine
  misc_feature (6)..(6): Xaa is Serine, no amino acid or Threonine
  misc_feature (7)..(7): Xaa is Asparagine or no amino acid
  misc_feature (8)..(8): Xaa is Glycine or no amino acid
  misc_feature (9)..(9): Xaa is Isoleucine, Aspartate or Asparagine
  misc_feature (10)..(10): Xaa is Threonine or Aspartate
  misc_feature (11)..(11): Xaa is Tyrosine or Aspartate
XXXXXXXXXXX

SEQ ID NO: 1160 - protein, 6 aa, Artificial Sequence
  CDR1 of the Heavy Chain of H5S14-12AL as described in Table 2.
TDIDDD

SEQ ID NO: 1161 - protein, 11 aa, Artificial Sequence
  CDR1 of the Heavy Chain of H5S19-22AL as described in Table 2.
QTLENTNGNTY

SEQ ID NO: 1162 - protein, 11 aa, Artificial Sequence
  CDR1 of the Heavy Chain of H5S19-24AL as described in Table 2.
KSLLHSNGITY

SEQ ID NO: 1163 - protein, 3 aa, Artificial Sequence
  Framework Region 2 of the Heavy Chain of Consensus Cluster #6 as described in Table 2.
CDR

SEQ ID NO: 1164 - protein, 17 aa, Artificial Sequence
  Framework Region 2 of the Heavy Chain of multiple antibodies as described in Table 2.
VAWYQQKPGQSPKLLIY

SEQ ID NO: 1165 - protein, 17 aa, Artificial Sequence
  Framework Region 2 of the Heavy Chain of multiple antibodies as described in Table 2.
MHWYQQKSGTSPKRWIY

SEQ ID NO: 1166 - protein, 17 aa, Artificial Sequence
  Framework Region 2 of the Heavy Chain of H5S14-1AL as described in Table 2.
LAWYQEKPGKTNQLLIY

SEQ ID NO: 1167 - protein, 17 aa, Artificial Sequence
  Framework Region 2 of the Heavy Chain of multiple antibodies as described in Table 2.
MHWYQQKPGQPPKLLIY

SEQ ID NO: 1168 - protein, 17 aa, Artificial Sequence
  Framework Region 2 of the Heavy Chain of H5S14-25AL as described in Table 2.
LAWYQQKPGNAPRLLIS

SEQ ID NO: 1169 - protein, 17 aa, Artificial Sequence
  Framework Region 2 of the Heavy Chain of multiple antibodies as described in Table 2.
MYWYQQKPGSSPKPWIY

SEQ ID NO: 1170 - protein, 17 aa, Artificial Sequence
  Framework Region 2 of the Heavy Chain of H5S14-6AL as described in Table 2.
LAWYQQKPGKSPQLLIY

SEQ ID NO: 1171 - protein, 17 aa, Artificial Sequence
  Framework Region 2 of the Heavy Chain of multiple antibodies as described in Table 2.
MNWYQQKPGQPPKLLIY

SEQ ID NO: 1172 - protein, 17 aa, Artificial Sequence
  Framework Region 2 of the Heavy Chain of multiple antibodies as described in Table 2.
VAWYQQKPGQSPKALIY

SEQ ID NO: 1173 - protein, 17 aa, Artificial Sequence
  Framework Region 2 of the Heavy Chain of H5S15-14BL as described in Table 2.
VAWYQQRPGQSPKSLIY

SEQ ID NO: 1174 - protein, 17 aa, Artificial Sequence
  Framework Region 2 of the Heavy Chain of H5S15-18AL as described in Table 2.
LHWYQQKSGASPKLWIY

SEQ ID NO: 1175 - protein, 17 aa, Artificial Sequence
  Framework Region 2 of the Heavy Chain of H5S15-24AL as described in Table 2.
MNWYQQKPRQPPKLLIY

SEQ ID NO: 1176 - protein, 17 aa, Artificial Sequence
  Framework Region 2 of the Heavy Chain of multiple antibodies as described in Table 2.
LNWYQQKPDGTVKLLIY

SEQ ID NO: 1177 - protein, 17 aa, Artificial Sequence
  Framework Region 2 of the Heavy Chain of H5S15-29AL as described in Table 2.
LHWYQQKSEASPKPWIY

SEQ ID NO: 1178 - protein, 17 aa, Artificial Sequence
  Framework Region 2 of the Heavy Chain of multiple antibodies as described in Table 2.
LHWYQQKSETSPKPWIY

SEQ ID NO: 1179 - protein, 17 aa, Artificial Sequence
  Framework Region 2 of the Heavy Chain of H5S19-6AL as described in Table 2.
MYWYQQKPGSSPRLLIY

SEQ ID NO: 1180 - protein, 17 aa, Artificial Sequence
  Framework Region 2 of the Heavy Chain of H5S19-8AL as described in Table 2.
LAWYQEKPGKTNKLLIY

SEQ ID NO: 1181 - protein, 17 aa, Artificial Sequence
  Framework Region 2 of the Heavy Chain of H5S20-16AL as described in Table 2.
IYWYQQKPRSSPKPWIS

SEQ ID NO: 1182 - protein, 17 aa, Artificial Sequence
  Framework Region 2 of the Heavy Chain of H5S20-16BL as described in Table 2.
IYWYQQKPRSSPKPWIY

SEQ ID NO: 1183 - protein, 17 aa, Artificial Sequence
  Framework Region 2 of the Heavy Chain of H5S20-17AL as described in Table 2.
LHWYQQKSHESPRLLIK

SEQ ID NO: 1184 - protein, 17 aa, Artificial Sequence
  Framework Region 2 of the Heavy Chain of H5S20-23AL as described in Table 2.
LTWYQQKPGQPPKLLIY

SEQ ID NO: 1185 - protein, 17 aa, Artificial Sequence
  Framework Region 2 of the Heavy Chain of H5S20-34AL as described in Table 2.
MYWYQQKPRSSPKPWIY

SEQ ID NO: 1186 - protein, 17 aa, Artificial Sequence
  Framework Region 2 of the Heavy Chain of H5S20-8BL as described in Table 2.
MNWFQQKPGQPPKLLIY

SEQ ID NO: 1187 - protein, 17 aa, Artificial Sequence
  Framework Region 2 of the Heavy Chain of ITI_045L as described in Table 2.
LHWYQQKPGFSPKLLIY

SEQ ID NO: 1188 - protein, 17 aa, Artificial Sequence
  Framework Region 2 of the Heavy Chain of ITI_082L as described in Table 2.
MYWYQQKSDASPKLWIY

SEQ ID NO: 1189 - protein, 17 aa, Artificial Sequence
  Framework Region 2 of the Heavy Chain of ITI_083L as described in Table 2.
MFWYQQKSDASPKLWIY

SEQ ID NO: 1190 - protein, 17 aa, Artificial Sequence
  Framework Region 2 of the Heavy Chain of ITI_145L as described in Table 2.
LNWYQQKPDGTVKLLIF

SEQ ID NO: 1191 - protein, 17 aa, Artificial Sequence
  Framework Region 2 of the Heavy Chain of ITI_200L as described in Table 2.
INWYQQRPGQPAKLLIF

SEQ ID NO: 1192 - protein, 17 aa, Artificial Sequence
  Framework Region 2 of the Heavy Chain of Consensus Cluster #7 as described in Table 2.
  misc_feature (1)..(1): Xaa is Leucine or Methionine
  misc_feature (2)..(2): Xaa is Asparagine, Histidine, Glutamate, Tyrosine or Serine
  misc_feature (4)..(4): Xaa is Leucine or Tyrosine
  misc_feature (5)..(5): Xaa is Leucine or Glutamine
  misc_feature (7)..(7): Xaa is Arginine or Lysine
  misc_feature (8)..(8): Xaa is Proline or Serine
  misc_feature (9)..(9): Xaa is Glycine or Serine
  misc_feature (10)..(10): Xaa is Glutamine or Threonine
  misc_feature (13)..(13): Xaa is Lysine, Asparagine or Glutamate
  misc_feature (14)..(14): Xaa is Arginine or Leucine
  misc_feature (15)..(15): Xaa is Leucine or Tryptophan
XXWXXQXXXXSPXXXIY

SEQ ID NO: 1193 - protein, 17 aa, Artificial Sequence
  Framework Region 2 of the Heavy Chain of multiple antibodies as described in Table 2.
LNWLLQRPGQSPKRLIY

SEQ ID NO: 1194 - protein, 17 aa, Artificial Sequence
  Framework Region 2 of the Heavy Chain of multiple antibodies as described in Table 2.
LEWYLQKPGQSPKLLIY

SEQ ID NO: 1195 - protein, 17 aa, Artificial Sequence
  Framework Region 2 of the Heavy Chain of H5S15-16AL as described in Table 2.
LEWYLQKPGQSPELLIY

SEQ ID NO: 1196 - protein, 17 aa, Artificial Sequence
  Framework Region 2 of the Heavy Chain of H5S15-1AL as described in Table 2.
MHWYQQKSSTSPKLWIY

SEQ ID NO: 1197 - protein, 17 aa, Artificial Sequence
  Framework Region 2 of the Heavy Chain of multiple antibodies as described in Table 2.
LSWLLQRPGQSPKRLIY

SEQ ID NO: 1198 - protein, 17 aa, Artificial Sequence
  Framework Region 2 of the Heavy Chain of H5S20-26AL as described in Table 2.
LYWLLQRPGQSPKRLIY

SEQ ID NO: 1199 - protein, 17 aa, Artificial Sequence
  Framework Region 2 of the Heavy Chain of H5S20-9EL as described in Table 2.
LEWYLQKPGQSPNLLIY

SEQ ID NO: 1200 - protein, 17 aa, Artificial Sequence
  Framework Region 2 of the Heavy Chain of Consensus Cluster #3 as described in Table 2.
  misc_feature (1)..(1): Xaa is Methionine or Leucine
  misc_feature (2)..(2): Xaa is Histidine, Phenylalanine, Tyrosine or Glutamine
  misc_feature (4)..(4): Xaa is Tyrosine or Phenylalanine
  misc_feature (7)..(7): Xaa is Lysine or Arginine
  misc_feature (8)..(8): Xaa is Serine or Proline
  misc_feature (10)..(10): Xaa is Serine or Threonine
  misc_feature (15)..(15): Xaa is Leucine or Tryptophan
  misc_feature (16)..(16): Xaa is Isoleucine or Leucine
XXWXQQXXGXSPKLXXY

SEQ ID NO: 1201 - protein, 17 aa, Artificial Sequence
  Framework Region 2 of the Heavy Chain of H5S14-3AL as described in Table 2.
MQWYQQKSGTSPKLLIY

SEQ ID NO: 1202 - protein, 17 aa, Artificial Sequence
  Framework Region 2 of the Heavy Chain of multiple antibodies as described in Table 2.
MHWYQQKSGTSPKLLIY

SEQ ID NO: 1203 - protein, 17 aa, Artificial Sequence
  Framework Region 2 of the Heavy Chain of multiple antibodies as described in Table 2.
LFWYQQKPGSSPKLWIY

SEQ ID NO: 1204 - protein, 17 aa, Artificial Sequence
  Framework Region 2 of the Heavy Chain of multiple antibodies as described in Table 2.
LYWFQQKPGSSPKLWIY

SEQ ID NO: 1205 - protein, 17 aa, Artificial Sequence
  Framework Region 2 of the Heavy Chain of multiple antibodies as described in Table 2.
LYWYQQKPGSSPKLWIY

SEQ ID NO: 1206 - protein, 17 aa, Artificial Sequence
  Framework Region 2 of the Heavy Chain of H5S19-5AL as described in Table 2.
LFWYQQKPGSSPKLWLY

SEQ ID NO: 1207 - protein, 17 aa, Artificial Sequence
  Framework Region 2 of the Heavy Chain of H5S20-10AL as described in Table 2.
MHWYQQRSGTSPKLLIY

SEQ ID NO: 1208 - protein, 17 aa, Artificial Sequence
  Framework Region 2 of the Heavy Chain of H5S20-22AL as described in Table 2.
MHWYQQKSGSSPKLLIY

SEQ ID NO: 1209 - protein, 17 aa, Artificial Sequence
  Framework Region 2 of the Heavy Chain of multiple antibodies as described in Table 2.
MFWYQQKSGTSPKLLIY

SEQ ID NO: 1210 - protein, 17 aa, Artificial Sequence
  Framework Region 2 of the Heavy Chain of Consensus Cluster #5 as described in Table 2.
  misc_feature (1)..(1): Xaa is Leucine or Isoleucine
  misc_feature (2)..(2): Xaa is Histidine, Serine, Alanine, Glycine or Asparagine
  misc_feature (4)..(4): Xaa is Tyrosine, Leucine or Phenylalanine
  misc_feature (7)..(7): Xaa is Lysine or Arginine
  misc_feature (9)..(9): Xaa is Glycine or Aspartate
  misc_feature (10)..(10): Xaa is Serine, Glycine, Glutamine or Lysine
  misc_feature (11)..(11): Xaa is Serine or Threonine
  misc_feature (12)..(12): Xaa is Proline, Isoleucine or Phenylalanine
  misc_feature (14)..(14): Xaa is Leucine, Arginine, Glycine or Threonine
  misc_feature (15)..(15): Xaa is Tryptophan or Leucine
  misc_feature (16)..(16): Xaa is Isoleucine or Valine
XXWXQQXPXXXXKXXXY

SEQ ID NO: 1211 - protein, 17 aa, Artificial Sequence
  Framework Region 2 of the Heavy Chain of multiple antibodies as described in Table 2.
LAWYQQKPGQSPKLLIY

SEQ ID NO: 1212 - protein, 17 aa, Artificial Sequence
  Framework Region 2 of the Heavy Chain of H5S14-22AL as described in Table 2.
LSWLQQKPDGTIKRLIY

SEQ ID NO: 1213 - protein, 17 aa, Artificial Sequence
  Framework Region 2 of the Heavy Chain of multiple antibodies as described in Table 2.
LSWFQQKPGKSPKTLIY

SEQ ID NO: 1214 - protein, 17 aa, Artificial Sequence
  Framework Region 2 of the Heavy Chain of multiple antibodies as described in Table 2.
LHWYQQKPGSSPKLWIY

SEQ ID NO: 1215 - protein, 17 aa, Artificial Sequence
  Framework Region 2 of the Heavy Chain of H5S19-15AL as described in Table 2.
LNWFQQKPGKSPKTLIY

SEQ ID NO: 1216 - protein, 17 aa, Artificial Sequence
  Framework Region 2 of the Heavy Chain of H5S20-12BL as described in Table 2.
LAWYQQRPGQSPKLLIY

SEQ ID NO: 1217 - protein, 17 aa, Artificial Sequence
  Framework Region 2 of the Heavy Chain of H5S20-4AL as described in Table 2.
LAWYQQKPGQSPKLLVY

SEQ ID NO: 1218 - protein, 17 aa, Artificial Sequence
  Framework Region 2 of the Heavy Chain of ITI_203L as described in Table 2.
IGWLQQKPGKSFKGLIY

SEQ ID NO: 1219 - protein, 17 aa, Artificial Sequence
  Framework Region 2 of the Heavy Chain of Consensus Cluster #1 as described in Table 2.
  misc_feature (13)..(13): Xaa is Lysine or Arginine
  misc_feature (15)..(15): Xaa is Leucine or Methionine
LHWYLQKPGQSPXLXIY

SEQ ID NO: 1220 - protein, 17 aa, Artificial Sequence
  Framework Region 2 of the Heavy Chain of multiple antibodies as described in Table 2.
LHWYLQKPGQSPKLLIY

SEQ ID NO: 1221 - protein, 17 aa, Artificial Sequence
  Framework Region 2 of the Heavy Chain of H5S15-10AL as described in Table 2.
LHWYLQKPGQSPRLLIY

SEQ ID NO: 1222 - protein, 17 aa, Artificial Sequence
  Framework Region 2 of the Heavy Chain of H5S15-11CL as described in Table 2.
LHWYLQKPGQSPKLMIY

SEQ ID NO: 1223 - protein, 17 aa, Artificial Sequence
  Framework Region 2 of the Heavy Chain of Consensus Cluster #4 as described in Table 2.
  misc_feature (2)..(2): Xaa is Alanine or Threonine
LXWYQQKQGKSPQLLVY

SEQ ID NO: 1224 - protein, 17 aa, Artificial Sequence
  Framework Region 2 of the Heavy Chain of multiple antibodies as described in Table 2.
LAWYQQKQGKSPQLLVY

SEQ ID NO: 1225 - protein, 17 aa, Artificial Sequence
  Framework Region 2 of the Heavy Chain of ITI_023L as described in Table 2.
LTWYQQKQGKSPQLLVY

SEQ ID NO: 1226 - protein, 17 aa, Artificial Sequence
  Framework Region 2 of the Heavy Chain of Consensus Cluster #2 as described in Table 2.
  misc_feature (1)..(1): Xaa is Leucine or Methionine
  misc_feature (2)..(2): Xaa is Tyrosine or Asparagine
  misc_feature (5)..(5): Xaa is Leucine or Glutamine
  misc_feature (10)..(10): Xaa is Glutamine or Glutamate
  misc_feature (11)..(11): Xaa is Serine or Proline
  misc_feature (13)..(13): Xaa is Glutamine or Lysine
  misc_feature (17)..(17): Xaa is Tyrosine or Serine
XXWYXQKPGXXPXLLIX

SEQ ID NO: 1227 - protein, 17 aa, Artificial Sequence
  Framework Region 2 of the Heavy Chain of H5S14-12AL as described in Table 2.
MNWYQQKPGEPPKLLIS

SEQ ID NO: 1228 - protein, 17 aa, Artificial Sequence
  Framework Region 2 of the Heavy Chain of H5S19-22AL as described in Table 2.
LNWYLQKPGQSPQLLIY

SEQ ID NO: 1229 - protein, 17 aa, Artificial Sequence
  Framework Region 2 of the Heavy Chain of H5S19-24AL as described in Table 2.
LYWYLQKPGQSPQLLIY

SEQ ID NO: 1230 - protein, 3 aa, Artificial Sequence
  CDR2 of the Heavy Chain of Consensus Cluster #6 as described in Table 2.
  misc_feature (1)..(1): Xaa is Alanine, Leucine, Tyrosine, Tryptophan, Serine, Glycine, Arginine or Aspartate
  misc_feature (2)..(2): Xaa is Alanine, Glutamate, Threonine or Glycine
  misc_feature (3)..(3): Xaa is Serine or Threonine
XXX

SEQ ID NO: 1231 - protein, 3 aa, Artificial Sequence
  CDR2 of the Heavy Chain of H5S14-15AL as described in Table 2.
YES

SEQ ID NO: 1232 - protein, 3 aa, Artificial Sequence
  CDR2 of the Heavy Chain of multiple antibodies as described in Table 2.
YAS

SEQ ID NO: 1233 - protein, 3 aa, Artificial Sequence
  CDR2 of the Heavy Chain of multiple antibodies as described in Table 2.
DTS

SEQ ID NO: 1234 - protein, 3 aa, Artificial Sequence
  CDR2 of the Heavy Chain of multiple antibodies as described in Table 2.
SGS

SEQ ID NO: 1235 - protein, 3 aa, Artificial Sequence
  CDR2 of the Heavy Chain of multiple antibodies as described in Table 2.
LAS

SEQ ID NO: 1236 - protein, 3 aa, Artificial Sequence
  CDR2 of the Heavy Chain of H5S14-25AL as described in Table 2.
GAT

SEQ ID NO: 1237 - protein, 3 aa, Artificial Sequence
  CDR2 of the Heavy Chain of multiple antibodies as described in Table 2.
RTS

SEQ ID NO: 1238 - protein, 3 aa, Artificial Sequence
  CDR2 of the Heavy Chain of multiple antibodies as described in Table 2.
AAT

SEQ ID NO: 1239 - protein, 3 aa, Artificial Sequence
  CDR2 of the Heavy Chain of multiple antibodies as described in Table 2.
AAS

SEQ ID NO: 1240 - protein, 3 aa, Artificial Sequence
  CDR2 of the Heavy Chain of multiple antibodies as described in Table 2.
SAS

SEQ ID NO: 1241 - protein, 3 aa, Artificial Sequence
  CDR2 of the Heavy Chain of multiple antibodies as described in Table 2.
STS

SEQ ID NO: 1242 - protein, 3 aa, Artificial Sequence
  CDR2 of the Heavy Chain of multiple antibodies as described in Table 2.
YTS

SEQ ID NO: 1243 - protein, 3 aa, Artificial Sequence
  CDR2 of the Heavy Chain of multiple antibodies as described in Table 2.
GTS

SEQ ID NO: 1244 - protein, 3 aa, Artificial Sequence
  CDR2 of the Heavy Chain of multiple antibodies as described in Table 2.
LTS

SEQ ID NO: 1245 - protein, 3 aa, Artificial Sequence
  CDR2 of the Heavy Chain of multiple antibodies as described in Table 2.
WAS

SEQ ID NO: 1246 - protein, 3 aa, Artificial Sequence
  CDR2 of the Heavy Chain of Consensus Cluster #7 as described in Table 2.
  misc_feature (1)..(1): Xaa is Leucine, Aspartate or Lysine
  misc_feature (2)..(2): Xaa is Valine or Threonine
XXS

SEQ ID NO: 1247 - protein, 3 aa, Artificial Sequence
  CDR2 of the Heavy Chain of multiple antibodies as described in Table 2.
LVS

SEQ ID NO: 1248 - protein, 3 aa, Artificial Sequence
  CDR2 of the Heavy Chain of multiple antibodies as described in Table 2.
KVS

SEQ ID NO: 1249 - protein, 3 aa, Artificial Sequence
  CDR2 of the Heavy Chain of Consensus Cluster #3 as described in Table 2.
  misc_feature (1)..(1): Xaa is Threonine, Serine or Glycine
  misc_feature (2)..(2): Xaa is Threonine or Alanine
XXS

SEQ ID NO: 1250 - protein, 3 aa, Artificial Sequence
  CDR2 of the Heavy Chain of multiple antibodies as described in Table 2.
TTS

SEQ ID NO: 1251 - protein, 3 aa, Artificial Sequence
  CDR2 of the Heavy Chain of Consensus Cluster #5 as described in Table 2.
  misc_feature (1)..(1): Xaa is Asparagine, Aspartate, Alanine, Tryptophan, Histidine or Arginine
  misc_feature (2)..(2): Xaa is Threonine, Alanine, Serine or Glycine
  misc_feature (3)..(3): Xaa is Serine, Threonine or Asparagine
XXX

SEQ ID NO: 1252 - protein, 3 aa, Artificial Sequence
  CDR2 of the Heavy Chain of multiple antibodies as described in Table 2.
RAN

SEQ ID NO: 1253 - protein, 3 aa, Artificial Sequence
  CDR2 of the Heavy Chain of H5S20-6AL as described in Table 2.
WSS

SEQ ID NO: 1254 - protein, 3 aa, Artificial Sequence
  CDR2 of the Heavy Chain of ITI_122L as described in Table 2.
NTS

SEQ ID NO: 1255 - protein, 3 aa, Artificial Sequence
  CDR2 of the Heavy Chain of ITI_203L as described in Table 2.
HGT

SEQ ID NO: 1256 - protein, 3 aa, Artificial Sequence
  CDR2 of the Heavy Chain of Consensus Cluster #4 as described in Table 2.
  misc_feature (1)..(1): Xaa is Asparagine or Alanine
  misc_feature (3)..(3): Xaa is Lysine or Threonine
XAX

SEQ ID NO: 1257 - protein, 3 aa, Artificial Sequence
  CDR2 of the Heavy Chain of multiple antibodies as described in Table 2.
NAK

SEQ ID NO: 1258 - protein, 3 aa, Artificial Sequence
  CDR2 of the Heavy Chain of Consensus Cluster #2 as described in Table 2.
  misc_feature (1)..(1): Xaa is Glutamine, Glutamate or Arginine
  misc_feature (2)..(2): Xaa is Methionine, Glycine or Valine
  misc_feature (3)..(3): Xaa is Serine or Asparagine
XXX

SEQ ID NO: 1259 - protein, 3 aa, Artificial Sequence
  CDR2 of the Heavy Chain of H5S14-12AL as described in Table 2.
EGN

SEQ ID NO: 1260 - protein, 3 aa, Artificial Sequence
  CDR2 of the Heavy Chain of H5S19-22AL as described in Table 2.
RVS

SEQ ID NO: 1261 - protein, 3 aa, Artificial Sequence
  CDR2 of the Heavy Chain of H5S19-24AL as described in Table 2.
QMS

SEQ ID NO: 1262 - protein, 36 aa, Artificial Sequence
  Framework Region 3 of the Heavy Chain of Consensus Cluster #6 as described in Table 2.
  misc_feature (1)..(1): Xaa is Asparagine, Glutamine, Threonine, Tyrosine, Arginine, Serine or Lysine
  misc_feature (2)..(2): Xaa is Leucine, Serine or Arginine
  misc_feature (3)..(3): Xaa is Glutamate, Aspartate, Isoleucine, Tyrosine, Threonine, Alanine, Glutamine or Histidine
  misc_feature (4)..(4): Xaa is Serine, Threonine, Proline or Aspartate
  misc_feature (6)..(6): Xaa is Isoleucine, Valine or Alanine
  misc_feature (8)..(8): Xaa is Alanine, Serine, Aspartate, Valine, Proline or Isoleucine
  misc_feature (11)..(11): Xaa is Serine, Arginine or Threonine
  misc_feature (15)..(15): Xaa is Serine or Tyrosine
  misc_feature (16)..(16): Xaa is Glycine or Arginine
  misc_feature (17)..(17): Xaa is Threonine, Serine, Asparagine or Lysine
  misc_feature (18)..(18): Xaa is Aspartate, Serine or Lysine
  misc_feature (19)..(19): Xaa is Phenylalanine or Tyrosine
  misc_feature (20)..(20): Xaa is Threonine or Serine
  misc_feature (21)..(21): Xaa is Leucine or Phenylalanine
  misc_feature (22)..(22): Xaa is Asparagine, Threonine, Serine or Lysine
  misc_feature (23)..(23): Xaa is Isoleucine or Phenylalanine
  misc_feature (24)..(24): Xaa is Histidine, Aspartate, Serine, Asparagine, Glycine or Threonine
  misc_feature (25)..(25): Xaa is Proline, Serine, Threonine, Asparagine or Arginine
  misc_feature (26)..(26): Xaa is Valine, Methionine or Leucine
  misc_feature (27)..(27): Xaa is Glutamate, Glutamine or Aspartate
  misc_feature (28)..(28): Xaa is Glutamate, Alanine, Proline, Glycine, Serine, Glutamine or Threonine
  misc_feature (29)..(29): Xaa is Glutamate or Aspartate
  misc_feature (31)..(31): Xaa is Alanine, Valine, Leucine, Phenylalanine or Isoleucine
  misc_feature (32)..(32): Xaa is Alanine, Glycine or Valine
  misc_feature (33)..(33): Xaa is Threonine, Serine, Methionine, Valine, Glutamate or Aspartate
  misc_feature (35)..(35): Xaa is Tyrosine, Phenylalanine or Histidine
XXXXGXPXRFXGSGXXXXXXXXXXXXXXXDXXXYXC

SEQ ID NO: 1263 - protein, 36 aa, Artificial Sequence
  Framework Region 3 of the Heavy Chain of multiple antibodies as described in Table 2.
NRYTGVPDRFTGSGYGTDFTFTISTVQAEDLAVYFC

SEQ ID NO: 1264 - protein, 36 aa, Artificial Sequence
  Framework Region 3 of the Heavy Chain of multiple antibodies as described in Table 2.
KLASGVPARFSGSGSGTSYSLTISSMEAEDAATYYC

SEQ ID NO: 1265 - protein, 36 aa, Artificial Sequence
  Framework Region 3 of the Heavy Chain of H5S14-1AL as described in Table 2.
TLQSGIPSRFSGSGSGTDFTLTISSLEPEDFAMYYC

SEQ ID NO: 1266 - protein, 36 aa, Artificial Sequence
  Framework Region 3 of the Heavy Chain of multiple antibodies as described in Table 2.
NLESGVPARFSGSGSRTDFTLTIDPVEADDAATYYC

SEQ ID NO: 1267 - protein, 36 aa, Artificial Sequence
  Framework Region 3 of the Heavy Chain of H5S14-25AL as described in Table 2.
SLETGVPPRFSGSGSGKDYTLSITSLQTEDVATYYC

SEQ ID NO: 1268 - protein, 36 aa, Artificial Sequence
  Framework Region 3 of the Heavy Chain of multiple antibodies as described in Table 2.
NLASGVPARFSGSGSGTSYSLTISSMEAEDAATYYC

SEQ ID NO: 1269 - protein, 36 aa, Artificial Sequence
  Framework Region 3 of the Heavy Chain of H5S14-4BL as described in Table 2.
NLASGVPARFSGSGSGSSYSLTISSMEAEDAATYYC

SEQ ID NO: 1270 - protein, 36 aa, Artificial Sequence
  Framework Region 3 of the Heavy Chain of H5S14-6AL as described in Table 2.
SLADGVPSRFSGSGSGTKFSFKISSLQAEDFVSYYC

SEQ ID NO: 1271 - protein, 36 aa, Artificial Sequence
  Framework Region 3 of the Heavy Chain of H5S15-13AL as described in Table 2.
NLDSGIPARFSGSGSGTDFTLNIHPVEEEDAATYYC

SEQ ID NO: 1272 - protein, 36 aa, Artificial Sequence
  Framework Region 3 of the Heavy Chain of multiple antibodies as described in Table 2.
YRYSGVPDRFTGSGSGTDFTLTISNVQSEDLAEYFC

SEQ ID NO: 1273 - protein, 36 aa, Artificial Sequence
  Framework Region 3 of the Heavy Chain of H5S15-14BL as described in Table 2.
YRYSGVPDRFTGSGSGTDFTLTISNVQSEDLADYFC

SEQ ID NO: 1274 - protein, 36 aa, Artificial Sequence
  Framework Region 3 of the Heavy Chain of H5S15-18AL as described in Table 2.
NLASGVPARFSGSGSGTSYSLTISSVEAEDAATYYC

SEQ ID NO: 1275 - protein, 36 aa, Artificial Sequence
  Framework Region 3 of the Heavy Chain of H5S15-24AL as described in Table 2.
NLESGIPARFRGSGSGTDFTLNIHPVEEEDAATYYC

SEQ ID NO: 1276 - protein, 36 aa, Artificial Sequence
  Framework Region 3 of the Heavy Chain of H5S15-28AL as described in Table 2.
RLHSGVPSRFSGSGSGSDYSLTISNLEQEDIATYFC

SEQ ID NO: 1277 - protein, 36 aa, Artificial Sequence
  Framework Region 3 of the Heavy Chain of multiple antibodies as described in Table 2.
NLASGVPVRFSGSGSGTSYSLTISSMEAEDAATYYC

SEQ ID NO: 1278 - protein, 36 aa, Artificial Sequence
  Framework Region 3 of the Heavy Chain of H5S15-4AL as described in Table 2.
NLASGVPIRFSGSGSGTSYSLTISSMEAEDAATYYC

SEQ ID NO: 1279 - protein, 36 aa, Artificial Sequence
  Framework Region 3 of the Heavy Chain of multiple antibodies as described in Table 2.
SLHSGVPSRFSGSGSGTDYSLTISNLEPEDIATYYC

SEQ ID NO: 1280 - protein, 36 aa, Artificial Sequence
  Framework Region 3 of the Heavy Chain of H5S19-17BL as described in Table 2.
SLHSGVPSRFRGSGSGTDYSLTISNLEPEDIATYYC

SEQ ID NO: 1281 - protein, 36 aa, Artificial Sequence
  Framework Region 3 of the Heavy Chain of H5S19-17CL as described in Table 2.
SLHSGVPSRFSGSGSGTDYSLTISNLEPEDIATYFC

SEQ ID NO: 1282 - protein, 36 aa, Artificial Sequence
  Framework Region 3 of the Heavy Chain of H5S19-17DL as described in Table 2.
SLHSGVPSRFSGSGSGTDYSLSISNLEPEDIATYYC

SEQ ID NO: 1283 - protein, 36 aa, Artificial Sequence
  Framework Region 3 of the Heavy Chain of H5S19-17EL as described in Table 2.
SLHSGVPSRFSGSGSGTDYSLTFSNLEPEDIATYYC

SEQ ID NO: 1284 - protein, 36 aa, Artificial Sequence
  Framework Region 3 of the Heavy Chain of multiple antibodies as described in Table 2.
TLHSGVPSRFSGSGSGTDYSLTISNLEPEDIATYYC

SEQ ID NO: 1285 - protein, 36 aa, Artificial Sequence
  Framework Region 3 of the Heavy Chain of H5S19-6AL as described in Table 2.
NLASGVPVRFSGSGSGTSYSLTISRMEAEDAATYYC

SEQ ID NO: 1286 - protein, 36 aa, Artificial Sequence
  Framework Region 3 of the Heavy Chain of H5S19-8AL as described in Table 2.
TLQSGIPSRFSGSGSGTDFTLTISSLEPEDFVMYHC

SEQ ID NO: 1287 - protein, 36 aa, Artificial Sequence
  Framework Region 3 of the Heavy Chain of multiple antibodies as described in Table 2.
NLESGIPARFSGSGSGTDFTLNIHPVEEEDAATYYC

SEQ ID NO: 1288 - protein, 36 aa, Artificial Sequence
  Framework Region 3 of the Heavy Chain of H5S20-17AL as described in Table 2.
QSISGIPSRFSGSGSGSDFTLSISSVEPEDVGMYYC

SEQ ID NO: 1289 - protein, 36 aa, Artificial Sequence
  Framework Region 3 of the Heavy Chain of H5S20-23AL as described in Table 2.
TRESGVPDRFTGSGSGTDFTLTISSVQAEDLAVYYC

SEQ ID NO: 1290 - protein, 36 aa, Artificial Sequence
  Framework Region 3 of the Heavy Chain of ITI_045L as described in Table 2.
NLASGVPPRFSGSGSGTSYSLTIGTMEAEDVATYYC

SEQ ID NO: 1291 - protein, 36 aa, Artificial Sequence
  Framework Region 3 of the Heavy Chain of ITI_082L as described in Table 2.
NLAPGVPARFSGSGSGNSYSLTISSMEGEDAATYYC

SEQ ID NO: 1292 - protein, 36 aa, Artificial Sequence
  Framework Region 3 of the Heavy Chain of ITI_083L as described in Table 2.
NLTPGVPARFSGSGSGNSYSLTISSMEAEDAATYYC

SEQ ID NO: 1293 - protein, 36 aa, Artificial Sequence
  Framework Region 3 of the Heavy Chain of multiple antibodies as described in Table 2.
SLHSGAPSRFSGSGSGTDYSLTISNLDPEDIATYYC

SEQ ID NO: 1294 - protein, 36 aa, Artificial Sequence
  Framework Region 3 of the Heavy Chain of ITI_162L as described in Table 2.
TLHSGVPSRFSGSGSGTDYSLTINNLEPEDIATYYC

SEQ ID NO: 1295 - protein, 36 aa, Artificial Sequence
  Framework Region 3 of the Heavy Chain of ITI_200L as described in Table 2.
NLESGIPARFSGSGSGTDFTLNIHPVEEEDAASYYC

SEQ ID NO: 1296 - protein, 36 aa, Artificial Sequence
  Framework Region 3 of the Heavy Chain of ITI_236L as described in Table 2.
RLHSGVPSRFSGSGSGTDYSLTISNLEQEDIATYFC

SEQ ID NO: 1297 - protein, 36 aa, Artificial Sequence
  Framework Region 3 of the Heavy Chain of Consensus Cluster #7 as described in Table 2.
  misc_feature (1)..(1): Xaa is Lysine or Asparagine
  misc_feature (2)..(2): Xaa is Leucine, Arginine or Valine
  misc_feature (3)..(3): Xaa is Aspartate, Proline, Phenylalanine or Valine
  misc_feature (8)..(8): Xaa is Aspartate or Glycine
  misc_feature (11)..(11): Xaa is Threonine or Serine
  misc_feature (13)..(13): Xaa is Serine or Asparagine
  misc_feature (17)..(17): Xaa is Threonine or Asparagine
  misc_feature (18)..(18): Xaa is Aspartate, Serine, Tyrosine or Glutamate
  misc_feature (19)..(19): Xaa is Phenylalanine or Tyrosine
  misc_feature (20)..(20): Xaa is Threonine or Serine
  misc_feature (22)..(22): Xaa is Lysine, Threonine or Asparagine
  misc_feature (25)..(25): Xaa is Arginine or Serine
  misc_feature (26)..(26): Xaa is Valine or Methionine
  misc_feature (31)..(31): Xaa is Leucine or Valine
  misc_feature (32)..(32): Xaa is Glycine or Alanine
  misc_feature (33)..(33): Xaa is Valine, Threonine or Isoleucine
XXXSGVPXRFXGXGSGXXXXLXISXXEAEDXXXYYC

SEQ ID NO: 1298 - protein, 36 aa, Artificial Sequence
  Framework Region 3 of the Heavy Chain of multiple antibodies as described in Table 2.
KLDSGVPDRFTGSGSGTDFTLKISRVEAEDLGVYYC

SEQ ID NO: 1299 - protein, 36 aa, Artificial Sequence
  Framework Region 3 of the Heavy Chain of multiple antibodies as described in Table 2.
NRFSGVPDRFSGSGSGTDFTLKISRVEAEDLGVYYC

SEQ ID NO: 1300 - protein, 36 aa, Artificial Sequence
  Framework Region 3 of the Heavy Chain of multiple antibodies as described in Table 2.
KLDSGVPDRFTGSGSGTDFTLKISRVEAEDLGIYYC

SEQ ID NO: 1301 - protein, 36 aa, Artificial Sequence
  Framework Region 3 of the Heavy Chain of H5S15-17AL as described in Table 2.
KRDSGVPDRFTGSGSGTDFTLKISRVEAEDLGVYYC

SEQ ID NO: 1302 - protein, 36 aa, Artificial Sequence
  Framework Region 3 of the Heavy Chain of H5S15-1AL as described in Table 2.
KLPSGVPGRFSGSGSGNSYSLTISSMEAEDVATYYC

SEQ ID NO: 1303 - protein, 36 aa, Artificial Sequence
  Framework Region 3 of the Heavy Chain of H5S15-6AL as described in Table 2.
KLDSGVPDRFTGSGSGTEFTLKISRVEAEDLGVYYC

SEQ ID NO: 1304 - protein, 36 aa, Artificial Sequence
  Framework Region 3 of the Heavy Chain of H5S20-21AL as described in Table 2.
NRVSGVPDRFSGSGSGTDFTLKISRVEAEDLGVYYC

SEQ ID NO: 1305 - protein, 36 aa, Artificial Sequence
  Framework Region 3 of the Heavy Chain of H5S20-26AL as described in Table 2.
KLDSGVPDRFTGSGSGTYFTLKISRVEAEDLGVYYC

SEQ ID NO: 1306 - protein, 36 aa, Artificial Sequence
  Framework Region 3 of the Heavy Chain of H5S20-31AL as described in Table 2.
KVDSGVPDRFTGSGSGTDFTLKISRVEAEDLGVYYC

SEQ ID NO: 1307 - protein, 36 aa, Artificial Sequence
  Framework Region 3 of the Heavy Chain of ITI_047L as described in Table 2.
KLDSGVPDRFTGNGSGTDFTLKISRVEAEDLGVYYC

SEQ ID NO: 1308 - protein, 36 aa, Artificial Sequence
  Framework Region 3 of the Heavy Chain of ITI_091L as described in Table 2.
NRFSGVPDRFSGSGSGTDFTLNISRVEAEDLGVYYC

SEQ ID NO: 1309 - protein, 36 aa, Artificial Sequence
  Framework Region 3 of the Heavy Chain of Consensus Cluster #3 as described in Table 2.
  misc_feature (8)..(8): Xaa is Serine, Alanine or Valine
  misc_feature (18)..(18): Xaa is Phenylalanine or Serine
  misc_feature (19)..(19): Xaa is Tyrosine or Phenylalanine
  misc_feature (20)..(20): Xaa is Serine or Tyrosine
  misc_feature (23)..(23): Xaa is Isoleucine or Leucine
  misc_feature (25)..(25): Xaa is Serine or Glycine
  misc_feature (26)..(26): Xaa is Valine or Methionine
  misc_feature (33)..(33): Xaa is Aspartate or Serine
  misc_feature (35)..(35): Xaa is Tyrosine or Phenylalanine
NLASGVPXRFSGSGSGTXXXLTXSXXEAEDAAXYXC

SEQ ID NO: 1310 - protein, 36 aa, Artificial Sequence
  Framework Region 3 of the Heavy Chain of multiple antibodies as described in Table 2.
NLASGVPSRFSGSGSGTFYSLTISSVEAEDAADYYC

SEQ ID NO: 1311 - protein, 36 aa, Artificial Sequence
  Framework Region 3 of the Heavy Chain of multiple antibodies as described in Table 2.
NLASGVPARFSGSGSGTSYSLTISSMEAEDAASYFC

SEQ ID NO: 1312 - protein, 36 aa, Artificial Sequence
  Framework Region 3 of the Heavy Chain of H5S19-14AL as described in Table 2.
NLASGVPARFSGSGSGTSYYLTLSSMEAEDAASYFC

SEQ ID NO: 1313 - protein, 36 aa, Artificial Sequence
  Framework Region 3 of the Heavy Chain of multiple antibodies as described in Table 2.
NLASGVPARFSGSGSGTSYYLTISSMEAEDAASYFC

SEQ ID NO: 1314 - protein, 36 aa, Artificial Sequence
  Framework Region 3 of the Heavy Chain of multiple antibodies as described in Table 2.
NLASGVPVRFSGSGSGTSYSLTISSMEAEDAASYFC

SEQ ID NO: 1315 - protein, 36 aa, Artificial Sequence
  Framework Region 3 of the Heavy Chain of ITI_127L as described in Table 2.
NLASGVPSRFSGSGSGTFFSLTISGVEAEDAADYYC

SEQ ID NO: 1316 - protein, 36 aa, Artificial Sequence
  Framework Region 3 of the Heavy Chain of ITI_128L as described in Table 2.
NLASGVPSRFSGSGSGTFYSLTISGVEAEDAADYYC

SEQ ID NO: 1317 - protein, 36 aa, Artificial Sequence
  Framework Region 3 of the Heavy Chain of Consensus Cluster #5 as described in Table 2.
  misc_feature (1)..(1): Xaa is Asparagine, Threonine or Arginine
  misc_feature (2)..(2): Xaa is Leucine, Arginine or Glycine
  misc_feature (3)..(3): Xaa is Alanine, Aspartate, Glutamate, Glycine or Valine
  misc_feature (4)..(4): Xaa is Serine or Aspartate
  misc_feature (8)..(8): Xaa is Alanine, Lysine, Aspartate or Serine
  misc_feature (11)..(11): Xaa is Serine or Threonine
  misc_feature (14)..(14): Xaa is Glycine or Arginine
  misc_feature (17)..(17): Xaa is Threonine, Serine, Alanine or Glutamine
  misc_feature (18)..(18): Xaa is Serine or Aspartate
  misc_feature (19)..(19): Xaa is Phenylalanine or Tyrosine
  misc_feature (20)..(20): Xaa is Serine or Threonine
  misc_feature (25)..(25): Xaa is Serine or Asparagine
  misc_feature (26)..(26): Xaa is Methionine, Leucine or Valine
  misc_feature (27)..(27): Xaa is Glutamate or Lysine
  misc_feature (28)..(28): Xaa is Alanine, Serine, Tyrosine or Phenylalanine
  misc_feature (31)..(31): Xaa is Alanine, Phenylalanine, Leucine or Methionine
  misc_feature (32)..(32): Xaa is Alanine or Glycine
  misc_feature (33)..(33): Xaa is Threonine, Aspartate, Valine or Isoleucine
  misc_feature (35)..(35): Xaa is Tyrosine or Phenylalanine
XXXXGVPXRFXGSXSGXXXXLTISXXXXEDXXXYXC

SEQ ID NO: 1318 - protein, 36 aa, Artificial Sequence
  Framework Region 3 of the Heavy Chain of multiple antibodies as described in Table 2.
TRESGVPDRFTGSGSGTDFTLTISSVKAEDLAVYYC

SEQ ID NO: 1319 - protein, 36 aa, Artificial Sequence
  Framework Region 3 of the Heavy Chain of H5S14-22AL as described in Table 2.
TLDSGVPKRFSGSRSGSDYSLTISSLESEDFADYYC

SEQ ID NO: 1320 - protein, 36 aa, Artificial Sequence
  Framework Region 3 of the Heavy Chain of H5S14-23AL as described in Table 2.
RLVDGVPSRFSGSGSGQDYSLTISSLEYEDMGIYYC

SEQ ID NO: 1321 - protein, 36 aa, Artificial Sequence
  Framework Region 3 of the Heavy Chain of multiple antibodies as described in Table 2.
RLVDGVPSRFSGSGSGQDYSLTISSLEFEDMGIYYC

SEQ ID NO: 1322 - protein, 36 aa, Artificial Sequence
  Framework Region 3 of the Heavy Chain of H5S20-27AL as described in Table 2.
TGESGVPDRFTGSGSGTDFTLTISSVKAEDLAVYYC

SEQ ID NO: 1323 - protein, 36 aa, Artificial Sequence
  Framework Region 3 of the Heavy Chain of H5S20-28AL as described in Table 2.
TRGSGVPDRFTGSGSGTDFTLTISSVKAEDLAVYYC

SEQ ID NO: 1324 - protein, 36 aa, Artificial Sequence
  Framework Region 3 of the Heavy Chain of ITI_122L as described in Table 2.
NLASGVPARFSGSGSGTSFSLTISSMEAEDAATYYC

SEQ ID NO: 1325 - protein, 36 aa, Artificial Sequence
  Framework Region 3 of the Heavy Chain of ITI_173L as described in Table 2.
RLVDGVPSRFSGSGSGQDYSLTISSLEFEDMGIYFC

SEQ ID NO: 1326 - protein, 36 aa, Artificial Sequence
  Framework Region 3 of the Heavy Chain of ITI_203L as described in Table 2.
NLEDGVPSRFSGSGSGADYSLTISNLESEDFADYYC

SEQ ID NO: 1327 - protein, 36 aa, Artificial Sequence
  Framework Region 3 of the Heavy Chain of Consensus Cluster #1 as described in Table 2.
  misc_feature (11)..(11): Xaa is Serine or Isoleucine
  misc_feature (13)..(13): Xaa is Serine or Glycine
  misc_feature (22)..(22): Xaa is Lysine or Arginine
  misc_feature (28)..(28): Xaa is Threonine or Alanine
NRFSGVPDRFXGXGSGTDFTLXISRVEXEDLGVYFC

SEQ ID NO: 1328 - protein, 36 aa, Artificial Sequence [sequence omitted]

SEQ ID NO: 1329 - protein, 36 aa, Artificial Sequence
  Framework Region 3 of the Heavy Chain of H5S15-10AL as described in Table 2.
NRFSGVPDRFSGGGSGTDFTLKISRVEAEDLGVYFC

SEQ ID NO: 1330 - protein, 36 aa, Artificial Sequence
  Framework Region 3 of the Heavy Chain of H5S15-11AL as described in Table 2.
NRFSGVPDRFIGSGSGTDFTLKISRVEAEDLGVYFC

SEQ ID NO: 1331 - protein, 36 aa, Artificial Sequence
  Framework Region 3 of the Heavy Chain of H5S15-11CL as described in Table 2.
NRFSGVPDRFSGSGSGTDFTLRISRVEAEDLGVYFC

SEQ ID NO: 1332 - protein, 36 aa, Artificial Sequence
  Framework Region 3 of the Heavy Chain of H5S15-11EL as described in Table 2.
NRFSGVPDRFSGSGSGTDFTLKISRVETEDLGVYFC

SEQ ID NO: 1333 - protein, 36 aa, Artificial Sequence
  Framework Region 3 of the Heavy Chain of Consensus Cluster #4 as described in Table 2.
  misc_feature (1)..(1): Xaa is Threonine or Asparagine
  misc_feature (4)..(4): Xaa is Glutamate or Aspartate
  misc_feature (18)..(18): Xaa is Glutamine or Histidine
  misc_feature (19)..(19): Xaa is Phenylalanine or Tyrosine
  misc_feature (25)..(25): Xaa is Serine or Asparagine
  misc_feature (28)..(28): Xaa is Proline or Serine
  misc_feature (30)..(30): Xaa is Aspartate or Glutamate
XLAXGVPSRFSGSGSGTXXSLKINXLQXEXFGSYYC

SEQ ID NO: 1334 - protein, 36 aa, Artificial Sequence
  Framework Region 3 of the Heavy Chain of H5S14-19AL as described in Table 2.
NLADGVPSRFSGSGSGTQYSLKINSLQSEDFGSYYC

SEQ ID NO: 1335 - protein, 36 aa, Artificial Sequence
  Framework Region 3 of the Heavy Chain of multiple antibodies as described in Table 2.
TLAEGVPSRFSGSGSGTQFSLKINSLQPEDFGSYYC

SEQ ID NO: 1336 - protein, 36 aa, Artificial Sequence
  Framework Region 3 of the Heavy Chain of H5S15-32AL as described in Table 2.
TLADGVPSRFSGSGSGTQYSLKINSLQPEDFGSYYC

SEQ ID NO: 1337 - protein, 36 aa, Artificial Sequence
  Framework Region 3 of the Heavy Chain of ITI_023L as described in Table 2.
TLADGVPSRFSGSGSGTQYSLKINNLQPEDFGSYYC

SEQ ID NO: 1338 - protein, 36 aa, Artificial Sequence
  Framework Region 3 of the Heavy Chain of ITI_240L as described in Table 2.
TLAEGVPSRFSGSGSGTHFSLKINSLQPEEFGSYYC

SEQ ID NO: 1339 - protein, 36 aa, Artificial Sequence
  Framework Region 3 of the Heavy Chain of Consensus Cluster #2 as described in Table 2.
  misc_feature (1)..(1): Xaa is Asparagine or Threonine
  misc_feature (2)..(2): Xaa is Leucine or Arginine
  misc_feature (3)..(3): Xaa is Alanine, Arginine or Phenylalanine
  misc_feature (4)..(4): Xaa is Serine or Proline
  misc_feature (7)..(7): Xaa is Proline or Leucine
  misc_feature (8)..(8): Xaa is Aspartate or Serine
  misc_feature (12)..(12): Xaa is Serine or Glycine
  misc_feature (15)..(15): Xaa is Serine or Tyrosine
  misc_feature (20)..(20): Xaa is Threonine or Valine
  misc_feature (21)..(21): Xaa is Leucine or Phenylalanine
  misc_feature (22)..(22): Xaa is Arginine, Threonine or Lysine
  misc_feature (24)..(24): Xaa is Serine or Glutamate
  misc_feature (25)..(25): Xaa is Arginine or Asparagine
  misc_feature (26)..(26): Xaa is Valine or Threonine
  misc_feature (27)..(27): Xaa is Glutamate or Leucine
  misc_feature (28)..(28): Xaa is Alanine or Serine
  misc_feature (31)..(31): Xaa is Valine or Leucine
  misc_feature (32)..(32): Xaa is Glycine or Alanine
  misc_feature (33)..(33): Xaa is Valine or Aspartate
  misc_feature (35)..(35): Xaa is Tyrosine or Phenylalanine
XXXXGVXXRFSXSGXGTDFXXXIXXXXXEDXXXYXC

SEQ ID NO: 1340 - protein, 36 aa, Artificial Sequence
  Framework Region 3 of the Heavy Chain of H5S14-12AL as described in Table 2.
TLRPGVPSRFSSSGYGTDFVFTIENTLSEDVADYYC

SEQ ID NO: 1341 - protein, 36 aa, Artificial Sequence
  Framework Region 3 of the Heavy Chain of H5S19-22AL as described in Table 2.
NRFSGVLDRFSGSGSGTDFTLKISRVEAEDLGVYFC

SEQ ID NO: 1342 - protein, 36 aa, Artificial Sequence
  Framework Region 3 of the Heavy Chain of H5S19-24AL as described in Table 2.
NLASGVPDRFSSSGSGTDFTLRISRVEAEDVGVYYC

SEQ ID NO: 1343 - protein, 9 aa, Artificial Sequence
  CDR3 of the Heavy Chain of Consensus Cluster #6 as described in Table 2.
  misc_feature (2)..(2): Xaa is Glutamine, Histidine, Asparagine or Serine
  misc_feature (3)..(3): Xaa is Serine, Asparagine, Cysteine, Glycine, Aspartate, Phenylalanine, Histidine, Tryptophan, Tyrosine or Leucine
  misc_feature (4)..(4): Xaa is Asparagine, Tyrosine, Histidine, Threonine, Phenylalanine, Serine or Tryptophan
  misc_feature (5)..(5): Xaa is Glutamate, Alanine, Serine, Threonine, Lysine or Glycine
  misc_feature (6)..(6): Xaa is Aspartate, Phenylalanine, Tyrosine, Serine, Leucine, Isoleucine, Threonine or Asparagine
  misc_feature (7)..(7): Xaa is Proline or Threonine
  misc_feature (8)..(8): Xaa is Tryptophan, Leucine, Phenylalanine, Tyrosine, Proline or Arginine
QXXXXXXXT

SEQ ID NO: 1344 - protein, 9 aa, Artificial Sequence
  CDR3 of the Heavy Chain of multiple antibodies as described in Table 2.
QQDYSSPWT

SEQ ID NO: 1345 - protein, 9 aa, Artificial Sequence
  CDR3 of the Heavy Chain of H5S14-18AL as described in Table 2.
QQWSSNPFT

SEQ ID NO: 1346 - protein, 9 aa, Artificial Sequence
  CDR3 of the Heavy Chain of multiple antibodies as described in Table 2.
QQHNEYPWT

SEQ ID NO: 1347 - protein, 9 aa, Artificial Sequence
  CDR3 of the Heavy Chain of H5S14-20AL as described in Table 2.
QQNNEDPYT

SEQ ID NO: 1348 - protein, 9 aa, Artificial Sequence
  CDR3 of the Heavy Chain of H5S14-24AL as described in Table 2.
QQDYSSPLT

SEQ ID NO: 1349 - protein, 9 aa, Artificial Sequence
  CDR3 of the Heavy Chain of H5S14-25AL as described in Table 2.
QQYWSTPYT

SEQ ID NO: 1350 - protein, 9 aa, Artificial Sequence
  CDR3 of the Heavy Chain of multiple antibodies as described in Table 2.
QQYHSYPLT

SEQ ID NO: 1351 - protein, 9 aa, Artificial Sequence
  CDR3 of the Heavy Chain of H5S14-6AL as described in Table 2.
QQLHSTPYT

SEQ ID NO: 1352 - protein, 9 aa, Artificial Sequence
  CDR3 of the Heavy Chain of H5S15-13AL as described in Table 2.
QQSNEDPLT

SEQ ID NO: 1353 - protein, 9 aa, Artificial Sequence
  CDR3 of the Heavy Chain of multiple antibodies as described in Table 2.
QQYNSYPYT

SEQ ID NO: 1354 - protein, 9 aa, Artificial Sequence
  CDR3 of the Heavy Chain of multiple antibodies as described in Table 2.
QQWSSNPLT

SEQ ID NO: 1355 - protein, 9 aa, Artificial Sequence
  CDR3 of the Heavy Chain of H5S15-18AL as described in Table 2.
QQYSGYPLT

SEQ ID NO: 1356 - protein, 9 aa, Artificial Sequence
  CDR3 of the Heavy Chain of H5S15-24AL as described in Table 2.
QQSNEDPFT

SEQ ID NO: 1357 - protein, 9 aa, Artificial Sequence
  CDR3 of the Heavy Chain of H5S15-28AL as described in Table 2.
QQGNSLPWT

SEQ ID NO: 1358 - protein, 9 aa, Artificial Sequence
  CDR3 of the Heavy Chain of H5S15-29AL as described in Table 2.
QQWNSYPLT

SEQ ID NO: 1359 - protein, 9 aa, Artificial Sequence
  CDR3 of the Heavy Chain of multiple antibodies as described in Table 2.
QQWSSYPLT

SEQ ID NO: 1360 - protein, 9 aa, Artificial Sequence
  CDR3 of the Heavy Chain of multiple antibodies as described in Table 2.
QQYSKLPWT

SEQ ID NO: 1361 - protein, 9 aa, Artificial Sequence
  CDR3 of the Heavy Chain of H5S19-1AL as described in Table 2.
QQNNEDPPT

SEQ ID NO: 1362 - protein, 9 aa, Artificial Sequence
  CDR3 of the Heavy Chain of multiple antibodies as described in Table 2.
QQYFKLPWT

SEQ ID NO: 1363 - protein, 9 aa, Artificial Sequence
  CDR3 of the Heavy Chain of H5S19-6AL as described in Table 2.
QQWSSYPFT

SEQ ID NO: 1364 - protein, 9 aa, Artificial Sequence
  CDR3 of the Heavy Chain of multiple antibodies as described in Table 2.
QQSNEDPWT

SEQ ID NO: 1365 - protein, 9 aa, Artificial Sequence
  CDR3 of the Heavy Chain of H5S20-17AL as described in Table 2.
QNGHSFPLT

SEQ ID NO: 1366 - protein, 9 aa, Artificial Sequence
  CDR3 of the Heavy Chain of H5S20-18AL as described in Table 2.
QQNYADPWT

SEQ ID NO: 1367 - protein, 9 aa, Artificial Sequence
  CDR3 of the Heavy Chain of H5S20-23AL as described in Table 2.
QSDYSYPLT

SEQ ID NO: 1368 - protein, 9 aa, Artificial Sequence
  CDR3 of the Heavy Chain of H5S20-32AL as described in Table 2.
QQYNSYPFT

SEQ ID NO: 1369 - protein, 9 aa, Artificial Sequence
  CDR3 of the Heavy Chain of multiple antibodies as described in Table 2.
QQYNSYPLT

SEQ ID NO: 1370 - protein, 9 aa, Artificial Sequence
  CDR3 of the Heavy Chain of ITI_021L as described in Table 2.
QQNNEDPLT

SEQ ID NO: 1371 - protein, 9 aa, Artificial Sequence
  CDR3 of the Heavy Chain of ITI_045L as described in Table 2.
QQGSTIPYT

SEQ ID NO: 1372 - protein, 9 aa, Artificial Sequence
  CDR3 of the Heavy Chain of multiple antibodies as described in Table 2.
QQFTSSTWT

SEQ ID NO: 1373 - protein, 9 aa, Artificial Sequence
  CDR3 of the Heavy Chain of ITI_200L as described in Table 2.
QHCYEDPWT

SEQ ID NO: 1374 - protein, 9 aa, Artificial Sequence
  CDR3 of the Heavy Chain of ITI_236L as described in Table 2.
QQGNTLPYT

SEQ ID NO: 1375 - protein, 9 aa, Artificial Sequence
  CDR3 of the Heavy Chain of ITI_237L as described in Table 2.
QQYSKLPRT

SEQ ID NO: 1376 - protein, 10 aa, Artificial Sequence
  CDR3 of the Heavy Chain of Consensus Cluster #7 as described in Table 2.
  misc_feature (1)..(1): Xaa is Valine, Phenylalanine or Tryptophan
  misc_feature (3)..(3): Xaa is Glycine, Alanine, Asparagine, Leucine or Valine
  misc_feature (4)..(4): Xaa is Threonine or Serine
  misc_feature (5)..(5): Xaa is Histidine or Glycine
  misc_feature (6)..(6): Xaa is Phenylalanine or no amino acid
  misc_feature (7)..(7): Xaa is Proline, Phenylalanine or Valine
  misc_feature (8)..(8): Xaa is Methionine or Proline
  misc_feature (9)..(9): Xaa is Tyrosine, Leucine, Tryptophan, Histidine or Glutamine
  misc_feature (10)..(10): Xaa is Threonine or Alanine
XQXXXXXXXX

SEQ ID NO: 1377 - protein, 9 aa, Artificial Sequence
  CDR3 of the Heavy Chain of H5S14-11AL as described in Table 2.
WQLTHFPQT

SEQ ID NO: 1378 - protein, 9 aa, Artificial Sequence
  CDR3 of the Heavy Chain of H5S14-13AL and H5S19-7AL as described in Table 2.
FQGSHVPWT

SEQ ID NO: 1379 - protein, 9 aa, Artificial Sequence
  CDR3 of the Heavy Chain of H5S14-17AL as described in Table 2.
WQVTHFPQT

SEQ ID NO: 1380 - protein, 9 aa, Artificial Sequence
  CDR3 of the Heavy Chain of H5S14-2AL as described in Table 2.
WQGTHFPHA

SEQ ID NO: 1381 - protein, 9 aa, Artificial Sequence
  CDR3 of the Heavy Chain of multiple antibodies as described in Table 2.
WQGTHFPQT

SEQ ID NO: 1382 - protein, 9 aa, Artificial Sequence
  CDR3 of the Heavy Chain of multiple antibodies as described in Table 2.
FQGSHVPLT

SEQ ID NO: 1383 - protein, 9 aa, Artificial Sequence
  CDR3 of the Heavy Chain of multiple antibodies as described in Table 2.
WQNTHFPQT

SEQ ID NO: 1384 - protein, 9 aa, Artificial Sequence
  CDR3 of the Heavy Chain of H5S15-1AL as described in Table 2.
FQGSGFPLT

SEQ ID NO: 1385 - protein, 9 aa, Artificial Sequence
  CDR3 of the Heavy Chain of multiple antibodies as described in Table 2.
WQATHFPQT

SEQ ID NO: 1386 - protein, 10 aa, Artificial Sequence
  CDR3 of the Heavy Chain of H5S20-41AL as described in Table 2.
VQGTHFPMYT

SEQ ID NO: 1387 - protein, 9 aa, Artificial Sequence
  CDR3 of the Heavy Chain of Consensus Cluster #3 as described in Table 2.
  misc_feature (4)..(4): Xaa is Serine or Asparagine
  misc_feature (5)..(5): Xaa is Serine, Threonine, Asparagine or no amino acid
  misc_feature (6)..(6): Xaa is Tyrosine, Phenylalanine or Serine
  misc_feature (7)..(7): Xaa is Threonine, Leucine, Alanine, Proline or Tyrosine
  misc_feature (8)..(8): Xaa is Tryptophan, Arginine, Leucine or Proline
HQWXXXXXT

SEQ ID NO: 1388 - protein, 8 aa, Artificial Sequence
  CDR3 of the Heavy Chain of H5S14-3AL as described in Table 2.
HQWSSYPT

SEQ ID NO: 1389 - protein, 8 aa, Artificial Sequence
  CDR3 of the Heavy Chain of H5S14-5AL as described in Table 2.
HQWSSYLT

SEQ ID NO: 1390 - protein, 9 aa, Artificial Sequence
  CDR3 of the Heavy Chain of H5S15-8AL as described in Table 2.
HQWSSYLWT

SEQ ID NO: 1391 - protein, 9 aa, Artificial Sequence
  CDR3 of the Heavy Chain of multiple antibodies as described in Table 2.
HQWSSYPWT

SEQ ID NO: 1392 - protein, 9 aa, Artificial Sequence
  CDR3 of the Heavy Chain of H5S19-14AL as described in Table 2.
HQWSNFAWT

SEQ ID NO: 1393 - protein, 9 aa, Artificial Sequence
  CDR3 of the Heavy Chain of multiple antibodies as described in Table 2.
HQWNSYPWT

SEQ ID NO: 1394 - protein, 9 aa, Artificial Sequence
  CDR3 of the Heavy Chain of H5S19-18AL as described in Table 2.
HQWSTYPWT

SEQ ID NO: 1395 - protein, 9 aa, Artificial Sequence
  CDR3 of the Heavy Chain of multiple antibodies as described in Table 2.
HQWSSYAWT

SEQ ID NO: 1396 - protein, 9 aa, Artificial Sequence
  CDR3 of the Heavy Chain of H5S19-5AL as described in Table 2.
HQWSNYAWT

SEQ ID NO: 1397 - protein, 8 aa, Artificial Sequence
  CDR3 of the Heavy Chain of multiple antibodies as described in Table 2.
HQWSSYRT

SEQ ID NO: 1398 - protein, 9 aa, Artificial Sequence
  CDR3 of the Heavy Chain of multiple antibodies as described in Table 2.
HQWSSYTWT

SEQ ID NO: 1399 - protein, 9 aa, Artificial Sequence
  CDR3 of the Heavy Chain of Consensus Cluster #5 as described in Table 2.
  misc_feature (1)..(1): Xaa is Histidine, Leucine, Glutamine or Glycine
  misc_feature (4)..(4): Xaa is Histidine, Alanine, Tyrosine, Glycine or Aspartate
  misc_feature (5)..(5): Xaa is no amino acid, Arginine, Serine, Threonine, Glutamine or Glutamate
  misc_feature (6)..(6): Xaa is Arginine, Serine, Tyrosine or Phenylalanine
  misc_feature (7)..(7): Xaa is Serine, Glutamine or Proline
  misc_feature (8)..(8): Xaa is Proline, Tryptophan, Phenylalanine, Arginine or Tyrosine
XQYXXXXXT

SEQ ID NO: 1400 - protein, 9 aa, Artificial Sequence
  CDR3 of the Heavy Chain of H5S14-21AL as described in Table 2.
QQYYSYPWT

SEQ ID NO: 1401 - protein, 9 aa, Artificial Sequence
  CDR3 of the Heavy Chain of H5S14-22AL as described in Table 2.
LQYASYPFT

SEQ ID NO: 1402 - protein, 9 aa, Artificial Sequence
  CDR3 of the Heavy Chain of H5S14-23AL as described in Table 2.
LQYDEFPWT

SEQ ID NO: 1403 - protein, 9 aa, Artificial Sequence
  CDR3 of the Heavy Chain of H5S15-19AL as described in Table 2.
HQYHRSQWT

SEQ ID NO: 1404 - protein, 9 aa, Artificial Sequence
  CDR3 of the Heavy Chain of H5S15-21AL as described in Table 2.
QQYYSYPYT

SEQ ID NO: 1405 - protein, 9 aa, Artificial Sequence
  CDR3 of the Heavy Chain of H5S15-26AL as described in Table 2.
QQYYSYPRT

SEQ ID NO: 1406 - protein, 9 aa, Artificial Sequence
  CDR3 of the Heavy Chain of multiple antibodies as described in Table 2.
LQYDEFPFT

SEQ ID NO: 1407 - protein, 9 aa, Artificial Sequence
  CDR3 of the Heavy Chain of multiple antibodies as described in Table 2.
QQYYSYPFT

SEQ ID NO: 1408 - protein, 9 aa, Artificial Sequence
  CDR3 of the Heavy Chain of multiple antibodies as described in Table 2.
QQYYTYPFT

SEQ ID NO: 1409 - protein, 8 aa, Artificial Sequence
  CDR3 of the Heavy Chain of ITI_122L as described in Table 2.
HQYHRSPT

SEQ ID NO: 1410 - protein, 9 aa, Artificial Sequence
  CDR3 of the Heavy Chain of ITI_203L as described in Table 2.
GQYGQFPPT

SEQ ID NO: 1411 - protein, 10 aa, Artificial Sequence
  CDR3 of the Heavy Chain of Consensus Cluster #1 as described in Table 2.
  misc_feature (4)..(4): Xaa is Threonine or Isoleucine
  misc_feature (5)..(5): Xaa is no amino acid or Histidine
  misc_feature (6)..(6): Xaa is no amino acid or Valine
  misc_feature (7)..(7): Xaa is Histidine, Proline or Valine
  misc_feature (8)..(8): Xaa is Valine or Proline
  misc_feature (9)..(9): Xaa is Proline, Tryptophan or Phenylalanine
SQSXXXXXXT

SEQ ID NO: 1412 - protein, 9 aa, Artificial Sequence
  CDR3 of the Heavy Chain of H5S14-10AL as described in Table 2.
SQSIHVPFT

SEQ ID NO: 1413 - protein, 9 aa, Artificial Sequence
  CDR3 of the Heavy Chain of H5S14-7AL and H5S15-23AL as described in Table 2.
SQSTHVPFT

SEQ ID NO: 1414 - protein, 8 aa, Artificial Sequence
  CDR3 of the Heavy Chain of multiple antibodies as described in Table 2.
SQSTHVPT

SEQ ID NO: 1415 - protein, 10 aa, Artificial Sequence
  CDR3 of the Heavy Chain of H5S15-22AL as described in Table 2.
SQSTHVPPWT

SEQ ID NO: 1416 - protein, 9 aa, Artificial Sequence
  CDR3 of the Heavy Chain of Consensus Cluster #4 as described in Table 2.
  misc_feature (3)..(3): Xaa is Histidine or Phenylalanine
  misc_feature (4)..(4): Xaa is Tyrosine or Tryptophan
  misc_feature (5)..(5): Xaa is no amino acid or Glycine
  misc_feature (6)..(6): Xaa is Glycine, Threonine or Serine
  misc_feature (7)..(7): Xaa is Threonine, Proline or Methionine
  misc_feature (8)..(8): Xaa is Tyrosine, Arginine or Phenylalanine
QHXXXXXXT

SEQ ID NO: 1417 - protein, 9 aa, Artificial Sequence
  CDR3 of the Heavy Chain of H5S14-19AL as described in Table 2.
QHFWGTPRT

SEQ ID NO: 1418 - protein, 9 aa, Artificial Sequence
  CDR3 of the Heavy Chain of H5S14-9AL as described in Table 2.
QHHYGTMYT

SEQ ID NO: 1419 - protein, 8 aa, Artificial Sequence
  CDR3 of the Heavy Chain of H5S15-2AL as described in Table 2.
QHHYGTYT

SEQ ID NO: 1420 - protein, 8 aa, Artificial Sequence
  CDR3 of the Heavy Chain of multiple antibodies as described in Table 2.
QHFWSTFT

SEQ ID NO: 1421 - protein, 9 aa, Artificial Sequence
  CDR3 of the Heavy Chain of ITI_240L as described in Table 2.
QHHYGTPYT

SEQ ID NO: 1422 - protein, 9 aa, Artificial Sequence
  CDR3 of the Heavy Chain of Consensus Cluster #2 as described in Table 2.
  misc_feature (1)..(1): Xaa is Alanine or Leucine
  misc_feature (3)..(3): Xaa is Asparagine, Serine or Valine
  misc_feature (4)..(4): Xaa is Leucine, Aspartate or Threonine
  misc_feature (5)..(5): Xaa is Glutamate, Asparagine or Histidine
  misc_feature (6)..(6): Xaa is Leucine, Methionine or Valine
XQXXXXPYT

SEQ ID NO: 1423 - protein, 9 aa, Artificial Sequence
  CDR3 of the Heavy Chain of H5S14-12AL as described in Table 2.
LQSDNMPYT

SEQ ID NO: 1424 - protein, 9 aa, Artificial Sequence
  CDR3 of the Heavy Chain of H5S19-22AL as described in Table 2.
LQVTHVPYT

SEQ ID NO: 1425 - protein, 9 aa, Artificial Sequence
  CDR3 of the Heavy Chain of H5S19-24AL as described in Table 2.
AQNLELPYT

SEQ ID NO: 1426 - protein, 10 aa, Artificial Sequence
  Framework Region 4 of the Heavy Chain of Consensus Cluster #6 as described in Table 2.
  misc_feature (3)..(3): Xaa is Glycine, Alanine or Serine
  misc_feature (5)..(5): Xaa is Threonine or Alanine
  misc_feature (6)..(6): Xaa is Lysine or Asparagine
  misc_feature (8)..(8): Xaa is Glutamate or Alanine
  misc_feature (9)..(9): Xaa is Isoleucine or Leucine
  misc_feature (10)..(10): Xaa is Lysine, no amino acid or Arginine
FGXGXXLXXX

SEQ ID NO: 1427 - protein, 10 aa, Artificial Sequence
  Framework Region 4 of the Heavy Chain of multiple antibodies as described in Table 2.
FGGGTKLEIK

SEQ ID NO: 1428 - protein, 10 aa, Artificial Sequence
  Framework Region 4 of the Heavy Chain of multiple antibodies as described in Table 2.
FGSGTKLEIK

SEQ ID NO: 1429 - protein, 10 aa, Artificial Sequence
  Framework Region 4 of the Heavy Chain of multiple antibodies as described in Table 2.
FGAGTKLELK

SEQ ID NO: 1430 - protein, 10 aa, Artificial Sequence
  Framework Region 4 of the Heavy Chain of multiple antibodies as described in Table 2.
FGGGTNLEIK

SEQ ID NO: 1431 - protein, 10 aa, Artificial Sequence
  Framework Region 4 of the Heavy Chain of multiple antibodies as described in Table 2.
FGGGAKLEIK

SEQ ID NO: 1432 - protein, 9 aa, Artificial Sequence
  Framework Region 4 of the Heavy Chain of multiple antibodies as described in Table 2.
FGGGTKLEI

SEQ ID NO: 1433 - protein, 10 aa, Artificial Sequence
  Framework Region 4 of the Heavy Chain of H5S19-28AL as described in Table 2.
FGGGTKLAIK

SEQ ID NO: 1434 - protein, 9 aa, Artificial Sequence
  Framework Region 4 of the Heavy Chain of multiple antibodies as described in Table 2.
FGAGTKLEL

SEQ ID NO: 1435 - protein, 10 aa, Artificial Sequence
  Framework Region 4 of the Heavy Chain of H5S20-34AL as described in Table 2.
FGAGTKLELR

SEQ ID NO: 1436 - protein, 10 aa, Artificial Sequence
  Framework Region 4 of the Heavy Chain of Consensus Cluster #7 as described in Table 2.
  misc_feature (1)..(1): Xaa is Phenylalanine or Leucine
  misc_feature (3)..(3): Xaa is Glycine, Serine, Alanine or Threonine
  misc_feature (6)..(6): Xaa is Lysine, Asparagine or Glutamate
  misc_feature (9)..(9): Xaa is Isoleucine or Leucine
XGXGTXLEXK

SEQ ID NO: 1437 - protein, 10 aa, Artificial Sequence
  Framework Region 4 of the Heavy Chain of H5S20-24AL as described in Table 2.
LGGGTKLEIK

SEQ ID NO: 1438 - protein, 10 aa, Artificial Sequence
  Framework Region 4 of the Heavy Chain of H5S20-7DL as described in Table 2.
FGGGTELEIK

SEQ ID NO: 1439 - protein, 10 aa, Artificial Sequence
  Framework Region 4 of the Heavy Chain of multiple antibodies as described in Table 2.
FGTGTKLELK

SEQ ID NO: 1440 - protein, 10 aa, Artificial Sequence
  Framework Region 4 of the Heavy Chain of Consensus Cluster #3 as described in Table 2.
  misc_feature (3)..(3): Xaa is Glycine or Alanine
  misc_feature (5)..(5): Xaa is Threonine or Alanine
  misc_feature (6)..(6): Xaa is Lysine, Isoleucine, Methionine or Glutamate
  misc_feature (9)..(9): Xaa is Isoleucine or Leucine
  misc_feature (10)..(10): Xaa is Lysine or no amino acid
FGXGXXLEXX

SEQ ID NO: 1441 - protein, 9 aa, Artificial Sequence
  Framework Region 4 of the Heavy Chain of H5S14-3AL as described in Table 2.
FGGGTELEI

SEQ ID NO: 1442 - protein, 10 aa, Artificial Sequence
  Framework Region 4 of the Heavy Chain of multiple antibodies as described in Table 2.
FGGGTILEIK

SEQ ID NO: 1443 - protein, 9 aa, Artificial Sequence
  Framework Region 4 of the Heavy Chain of H5S19-10BL as described in Table 2.
FGGGTILEI

SEQ ID NO: 1444 - protein, 10 aa, Artificial Sequence
  Framework Region 4 of the Heavy Chain of ITI_033L as described in Table 2.
FGGGTMLEIK

SEQ ID NO: 1445 - protein, 10 aa, Artificial Sequence
  Framework Region 4 of the Heavy Chain of Consensus Cluster #5 as described in Table 2.
  misc_feature (3)..(3): Xaa is Glycine or Serine
  misc_feature (9)..(9): Xaa is Isoleucine or Methionine
  misc_feature (10)..(10): Xaa is Lysine or no amino acid
FGXGTKLEXX

SEQ ID NO: 1446 - protein, 10 aa, Artificial Sequence
  Framework Region 4 of the Heavy Chain of multiple antibodies as described in Table 2.
FGSGTKLEMK

SEQ ID NO: 1447 - protein, 10 aa, Artificial Sequence
  Framework Region 4 of the Heavy Chain of Consensus Cluster #1 as described in Table 2.
  misc_feature (3)..(3): Xaa is Serine or Glycine
  misc_feature (9)..(9): Xaa is Isoleucine or Valine
FGXGTKLEXK

SEQ ID NO: 1448 - protein, 10 aa, Artificial Sequence
  Framework Region 4 of the Heavy Chain of multiple antibodies as described in Table 2.
FGSGTKLEVK

SEQ ID NO: 1449 - protein, 10 aa, Artificial Sequence
  Framework Region 4 of the Heavy Chain of Consensus Cluster #4 as described in Table 2.
  misc_feature (3)..(3): Xaa is Glycine or Serine
  misc_feature (9)..(9): Xaa is Isoleucine or Valine
FGXGTKLEXK

What is claimed is:

1. An isolated antibody that binds to HVEM, comprising:
(a) a heavy chain comprising VH CDR1, VH CDR2, and VH CDR3 comprising, respectively: SEQ ID Nos 285, 464, and 709 (consensus cluster 11); SEQ ID Nos 298, 470, and 720 (consensus cluster 20); SEQ ID Nos 304, 478, and 729 (consensus cluster 5); SEQ ID Nos 310, 481, and 733 (consensus cluster 23); SEQ ID Nos 321, 495, and 751 (consensus cluster 21); SEQ ID Nos 328, 504, and 753 (consensus cluster 10); SEQ ID Nos 336, 513, and 776 (consensus cluster 8); SEQ ID Nos 340, 514, and 783 (consensus cluser 15); SEQ ID Nos 347, 522, and 795 (consensus cluster 19); SEQ ID Nos 351, 525, and 801 (consensus cluster 14); SEQ ID Nos 355, 530, and 808 (consensus cluster 6); SEQ ID Nos 356, 531, and 811 (consensus cluster 12); SEQ ID Nos 358, 535, and 815 (consensus cluster 4); SEQ ID Nos 361, 538, and 816 (consensus cluster 9); SEQ ID Nos 364, 541, and 821 (consensus cluster 17); SEQ ID Nos 366, 544, and 826 (consensus cluster 7); SEQ ID Nos 367, 547, and 829 (consensus cluster 13); SEQ ID Nos 369, 550, and 833 (consensus cluster 18); SEQ ID Nos 371, 553, and 837 (consensus cluster 22); SEQ ID Nos 374, 557, and 841 (consensus cluster 16); SEQ ID Nos 338, 513, and 844 (consensus cluster 1); SEQ ID Nos 375, 559, and 845 (consensus cluster 2); or SEQ ID Nos 376, 560, and 846 (consensus cluster 3); and
(b) a light chain comprising VL CDR1, VL CDR2, and VL CDR3 comprising, respectively: SEQ ID Nos 1099, 1230, and 1343 (consensus cluster 6); SEQ ID Nos 1129, 1246, and 1376 (consensus cluster 7); SEQ ID Nos 1136, 1249, and 1387 (consensus cluster 3); SEQ ID Nos 1142, 1251, and 1399 (consensus cluster 5); SEQ ID Nos 1152, 1248, and 1411 (consensus cluster 1); SEQ ID Nos 1155, 1256, and 1416 (consensus cluster 4); and SEQ ID Nos 1159, 1258, and 1422 (consensus cluster 2).

2. The antibody of claim 1, wherein the heavy chain further comprises an FR1, FR2, FR3, and FR4 corresponding to the consensus cluster of the VH CDR1, VH CDR2, and VH CDR3, and/or wherein the light chain further comprises an FR1, FR2, FR3, and FR4 corresponding to the consensus cluster of the VL CDR1, VL CDR2, and VL CDR3.

3. An isolated antibody that binds to HVEM, comprising a heavy chain comprising VH CDR1, VH CDR2, and VH CDR3 and the VL CDR1, VL CDR2, and VL CDR3 of any one of Ab_001, Ab_006, Ab_008, Ab_009, Ab_010, Ab_011, Ab_012, Ab_013, Ab_025, Ab_026, Ab_027, Ab_028, Ab_029, Ab_030, Ab_031, Ab_034, Ab_035, Ab_036, Ab_043, Ab_044, Ab_045, Ab_046, Ab_050, Ab_051, Ab_058, Ab_063, Ab_159, Ab_064, Ab_065, Ab_066, Ab_067, Ab_068, Ab_069, Ab_155, Ab_070, Ab_071, Ab_149, Ab_072, Ab_073, Ab_074, Ab_078, Ab_079, Ab_080, Ab_083, Ab_153, or Ab_087.

4. The antibody of claim 3, wherein the heavy chain comprises a heavy chain variable region (VH) with an amino acid sequence that is at least 90%, at least 95%, or at least 97% identical to that of the VH of Ab_001, Ab_006, Ab_008, Ab_009, Ab_010, Ab_011, Ab_012, Ab_013, Ab_025, Ab_026, Ab_027, Ab_028, Ab_029, Ab_030, Ab_031, Ab_034, Ab_035, Ab_036, Ab_043, Ab_044, Ab_045, Ab_046, Ab_050, Ab_051, Ab_058, Ab_063, Ab_159, Ab_064, Ab_065, Ab_066, Ab_067, Ab_068, Ab_069, Ab_155, Ab_070, Ab_071, Ab_149, Ab_072, Ab_073, Ab_074, Ab_078, Ab_079, Ab_080, Ab_083, Ab_153, or Ab_087, and/or wherein the light chain comprises a light chain variable region (VL) with an amino acid sequence that is at least 90%, at least 95%, or at least 97% identical to that of the VL of Ab_001, Ab_006, Ab_008, Ab_009, Ab_010, Ab_011, Ab_012, Ab_013, Ab_025, Ab_026, Ab_027, Ab_028, Ab_029, Ab_030, Ab_031, Ab_034, Ab_035, Ab_036, Ab_043, Ab_044, Ab_045, Ab_046, Ab_050, Ab_051, Ab_058, Ab_063, Ab_159, Ab_064, Ab_065, Ab_066, Ab_067, Ab_068, Ab_069, Ab_155, Ab_070, Ab_071, Ab_149, Ab_072, Ab_073, Ab_074, Ab_078, Ab_079, Ab_080, Ab_083, Ab_153, or Ab_087.

5. The antibody of claim 3, wherein the heavy chain comprises a VH with an amino acid sequence comprising the amino acid sequence of the VH of Ab_001, Ab_006, Ab_008, Ab_009, Ab_010, Ab_011, Ab_012, Ab_013, Ab_025, Ab_026, Ab_027, Ab_028, Ab_029, Ab_030, Ab_031, Ab_034, Ab_035, Ab_036, Ab_043, Ab_044, Ab_045, Ab_046, Ab_050, Ab_051, Ab_058, Ab_063, Ab_159, Ab_064, Ab_065, Ab_066, Ab_067, Ab_068, Ab_069, Ab_155, Ab_070, Ab_071, Ab_149, Ab_072, Ab_073, Ab_074, Ab_078, Ab_079, Ab_080, Ab_083, Ab_153, or Ab_087, and/or wherein the light chain comprises a VL with an amino acid sequence comprising the amino acid sequence of the VL of Ab_001, Ab_006, Ab_008, Ab_009, Ab_010, Ab_011, Ab_012, Ab_013, Ab_025, Ab_026, Ab_027, Ab_028, Ab_029, Ab_030, Ab_031, Ab_034, Ab_035, Ab_036, Ab_043, Ab_044, Ab_045, Ab_046, Ab_050, Ab_051, Ab_058, Ab_063, Ab_159, Ab_064, Ab_065, Ab_066, Ab_067, Ab_068, Ab_069, Ab_155, Ab_070, Ab_071, Ab_149, Ab_072, Ab_073, Ab_074, Ab_078, Ab_079, Ab_080, Ab_083, Ab_153, or Ab_087.

6. An isolated antibody that binds to HVEM, comprising:
(a) an antibody selected from any one of the antibodies listed by either AntibodyID or Ab_Num_Id as described in Table 1;
(b) an antibody comprising a heavy chain comprising an amino acid sequence selected from any one of the amino acid sequences of SEQ ID NO:1-201;
(c) an antibody comprising a light chain comprising an amino acid sequence selected from any one of the amino acid sequences of SEQ ID NO:874-1032;
(d) an antibody comprising a heavy chain comprising an amino acid sequence selected from any one of the amino acid sequences of SEQ ID NO:1-201 and a light chain comprising an amino acid sequence selected from any one of the amino acid sequences of SEQ ID NO:874-1032;
(e) an amino acid sequence having at least 70%, at least 75%, at least 80%, at least 85%, at least 90%, at least 91%, at least 92%, at least 93%, at least 94%, at least 95%, at least 96%, at least 97%, at least 98%, at least 99%, or at least 100% sequence identity to any one of (a)-(d);
(f) the amino acid sequence of (e), wherein CDRH1, CDRH2 and CDRH3 of SEQ ID NO:1-201 is maintained;
(g) the amino acid sequence of (e), wherein CDRL1, CDRL2 and CDRL3 of SEQ ID NO:874-1032 is maintained;
(h) the amino acid sequence of (e), wherein the CDRH1, CDRH2, and CDRH3 of of SEQ ID NO:1-201 and CDRL1, CDRL2 and CDRL3 of SEQ ID NO:874-1032 is maintained;
(i) an antibody comprising a CDRH1, a CDRH2, and a CDRH3 selected from an amino acid sequence of any one of SEQ ID NO:1-201;
(j) an antibody comprising a CDRL1, a CDRL2, and a CDRL3 selected from an amino acid sequence of any one of SEQ ID NO:874-1032;
(k) an antibody comprising a CDRH1, a CDRH2, and a CDRH3 selected from an amino acid sequence of any one of SEQ ID NO:1-201 and a CDRL1, a CDRL2, and a CDRL3 selected from an amino acid sequence of any one of SEQ ID NO:874-1032;
(l) an antibody comprising a CDRH1, a CDRH2, and a CDRH3 selected from an amino acid sequence of any one of SEQ ID NO:1-201 and a CDRL1, a CDRL2, and a CDRL3 selected from an amino acid sequence of any one of SEQ ID NO:874-1032, wherein said selection of CDRH1, CDRH2, CDRH3, CDRL1, CDRL2, and CDRL3 are selected from the same AntibodyId as described in Table 1;
(m) an antibody comprising at least one of SEQ ID NO: 202-873 and/or at least one of SEQ ID NO:1033-1449;
(n) a single-chain variable fragment (“scFV”) comprising any one of (a)-(m); or
(o) a heavy chain and/or a light chain variable domain comprising any one of (a)-(m).

7. The antibody of any one of claims 1-6, wherein (a) the heavy chain comprises:
(1) a human IgM constant domain; (2) a human IgGI constant domain; (3) a human IgG2 constant domain; (4) a human IgG3 constant domain; (5) a human IgG4 constant domain; or (6) a human IgA constant domain;
(b) the light chain comprises a human Ig kappa constant domain or a human Ig lambda constant domain; or
(c) the heavy chain comprises: (1) a human IgM constant domain; (2) a human IgGI constant domain; (3) a human IgG2 constant domain; (4) a human IgG3 constant domain; (5) a human IgG4 constant domain; or (6) a human IgA constant domain; and
the light chain comprises a human Ig kappa constant domain or a human Ig lambda constant domain.

8. The antibody of any one of claims 1-7, wherein the antibody comprises a full length heavy chain constant region and/or a full length light chain constant region.

9. The antibody of any one of claims 1-7, wherein the antibody is a Fab fragment, a Fab′ fragment, a F(ab′)2 fragment, a Fv fragment, a disulfide linked F fragment, or a scFv fragment.

10. The antibody of any one of claims 1-9, wherein the antibody:
(a) blocks the binding of human BTLA to human HVEM with an IC50 of 10 nM or less, 3 nM or less, or 2 nM or less;
(b) blocks the binding of human LIGHT to human HVEM with an IC50 of 30 nM or less, 20 nM or less, or 10 nM or less;
(c) blocks the binding of human BTLA to human HVEM with an IC50 of 10 nM or less, 3 nM or less, or 2 nM or less, and also blocks the binding of human LIGHT to human HVEM; or
(d) blocks the binding of human LIGHT to human HVEM with an IC50 of 30 nM or less, 20 nM or less, or 10 nM or less, and also blocks the binding of human BTLA to human HVEM.

11. The antibody of any one of claims 1-10, wherein the antibody binds to human HVEM with a K_{D} of 50 nM or less, or 10 nM or less.

12. The antibody of any one of claims 1-11, wherein the antibody binds to cynomolgus monkey HVEM with a K_{D} of 50 nM or less, or 10 nM or less.

13. The antibody of any one of claims 1-12, wherein the antibody is bispecific or multispecific.

14. The antibody of claim 13, wherein the antibody is a bispecific antibody selected from: a bispecific T-cell engager (BiTE) antibody, a dual-affinity retargeting molecule (DART), a CrossMAb antibody, a DutaMab™ antibody, a DuoBody antibody; a Triomab, a TandAb, a bispecific NanoBody, Tandem scFv, a diabody, a single chain diabody, a HSA body, a (scFv)2 HSA Antibody, an scFv-IgG antibody, a Dock and Lock bispecific antibody, a DVD-IgG antibody, a TBTI DVD-IgG, an IgG-fynomer, a Tetravalent bispecific tandem IgG antibody, a dual-targeting domain antibody, a chemically linked bispecific (Fab′)2 molecule, a crosslinked mAb, a Dual-action Fab IgG (DAF-IgG), an orthoFab-IgG, a bispecific CovX-Body, a bispecific hexavalent trimerbody, 2 scFv linked to diphtheria toxin, and an ART-Ig.

15. The antibody of either claim 13 or 14, wherein the antibody is a bispecific antibody comprising (a) an anti-CXCL12 antibody; (b) an anti-CXCR4 antibody; (c) an anti-CD47 antibody; (d) a checkpoint inhibitor antibody, preferably an anti-PD-1 antibody, an anti-PD-L1 antibody, an anti-CTLA-4 antibody, an anti-TIM-3 antibody, and/or an anti-LAG3 antibody, (e) an anti-T-cell co-receptor antibody (e.g., an anti-4-1 BB (CD137) antibody or an anti-ICOS (CD278) antibody); or (f) an anti-neoantigen antibody.

16. The antibody of claim 15, wherein the antibody is an anti-neoantigen antibody, wherein the neoantigen is selected from: MAGE-A1, MAGE-A2, MAGE-A3, MAGE-A4, MAGE-A5, MAGE-A6, MAGE-A7, MAGE-A8, MAGE-A9, MAGE-A10, MAGE-A11, MAGE-A12, GAGE-1, GAGE-2, GAGE-3, GAGE-4, GAGE-5, GAGE-6, GAGE-7, GAGE-8, BAGE-1, RAGE-1, LB33/MUM-1, PRAME, NAG, MAGE-Xp2 (MAGE-B2), MAGE-Xp3 (MAGE-B3), MAGE-Xp4 (MAGE-B4), MAGE-C1/CT7, MAGE-C2, NY-ESO-1, LAGE-1, SSX-I, SSX-2(HOM-MEL-40), SSX-3, SSX-4, SSX-5, SCP-1 and XAGE, melanocyte differentiation antigens, p53, ras, CEA, MUC1, PMSA, PSA, tyrosinase, Melan-A, MART-1, gp100, gp75, alpha-actinin-4, Bcr-Abl fusion protein, Casp-8, beta-catenin, cdc27, cdk4, cdkn2a, coa-1, dek-can fusion protein, EF2, ETV6-AML1 fusion protein, LDLR-fucosyltransferaseAS fusion protein, HLA-A2, HLA-A11, hsp70-2, KIAAO205, Mart2, Mum-2, and 3, neo-PAP, myosin class I, OS-9, pml-RAR alpha fusion protein, PTPRK, K-ras, N-ras, Triosephosphate isomerase, GnTV, Herv-K-mel, NA-88, SP17, and TRP2-Int2, (MART-1), E2A-PRL, H4-RET, IGH-IGK, MYL-RAR, Epstein Barr virus antigens, EBNA, human papillomavirus (HPV) antigens E6 and E7, TSP-180, MAGE-4, MAGE-5, MAGE-6, p185erbB2, p180erbB-3, c-met, nm-23H1, PSA, TAG-72-4, CA 19-9, CA 72-4, CAM 17.1, NuMa, K-ras, alpha.-fetoprotein, 13HCG, BCA225, BTAA, CA 125, CA 15-3 (CA 27.29BCAA), CA 195, CA 242, CA-50, CAM43, CD68\KP1, CO-029, FGF-5, G250, Ga733 (EpCAM), HTgp-175, M344, MA-50, MG7-Ag, MOV18, NB\170K, NY-CO-1, RCAS1, SDCCAG16, TA-90 (Mac-2 binding proteincyclophilin C-associated protein), TAAL6, TAG72, TLP, TPS, tyrosinase related proteins, TRP-1, TRP-2, or mesothelin.

17. The antibody of any one of claims 1-16, wherein the antibody further comprises:
(a) a detectable label, such as a radiolabel, an enzyme, a fluorescent label, a luminescent label, or a bioluminescent label; or
(b) a conjugated therapeutic or cytotoxic agent.

18. The antibody of claim 17, wherein:
(a) the detectable label is selected from 1251, 1311, In, 90Y, 99Tc, 177Lu, 166Ho, or 153Sm, or a biotinylated molecule; or
(b) the conjugated therapeutic or cytotoxic agent is selected from (a) an anti-metabolite; (b) an alkylating agent; (c) an antibiotic; (d) a growth factor; (e) a cytokine;
(f) an anti-angiogenic agent; (g) an anti-mitotic agent; (h) an anthracycline; (i) toxin; and/or (j) an apoptotic agent.

19. An isolated antibody that competes with an antibody according to any one of claims 1-18 for binding to HVEM.

20. A kit comprising the isolated antibody of any one of claims 1-18.

21. A pharmaceutical composition comprising the isolated antibody according to any one of claims 1-19, and further comprising a pharmaceutical acceptable carrier and/or excipient.

22. An isolated nucleic acid encoding the antibody of any one of claims 1-19, or encoding the heavy chain or light chain of the antibody.

23. A set of isolated nucleic acids encoding the antibody of any one of claims 1-19.

24. A vector comprising the nucleic acid or the set of nucleic acids of claim 22 of 23.

25. An isolated host cell comprising the nucleic acid of claim 22, the set of nucleic acids of claim 23, or the vector of claim 24, or an isolated host cell engineered to express the antibody of any one of claims 1-19.

26. Use of the antibody of any one of claims 1-19, wherein said use is selected from:
(a) a method of detecting aberrant expression of the HVEM protein in a sample in vitro or in a subject;
(b) a method for diagnosing a disease or disorder associated with aberrant HVEM protein expression or activity;
(c) a method of inhibiting HVEM activity in a sample in vitro or in a subject;
(d) a method of increasing HVEM activity in a sample in vitro or in a subject;
(e) a method of inhibiting HVEM binding to BTLA and/or LIGHT in a sample in vitro or in a subject; and/or
(f) a method of treating a disease or disorder in a subject associated with aberrant HVEM expression or activity.

27. Use of the antibody of any one of claims 1-19 in preparation of a medicament for diagnosis or treatment of a disease or disorder in a human subject.

28. The use of claim 27, wherein:
(a) the disease or disorder is HIV infection;
(b) the disease or disorder is cancer, such as an adenocarcinoma, sarcoma, skin cancer, melanoma, bladder cancer, brain cancer, breast cancer, uterus cancer, ovarian cancer, prostate cancer, lung cancer, colorectal cancer, cervical cancer, liver cancer, head and neck cancer, esophageal cancer, pancreas cancer, pancreatic ductal adenocarcinoma (PDA), renal cancer, stomach cancer, multiple myeloma or cerebral cancer;
(c) the use further comprises co-administering other anti-cancer therapies, such as a chemotherapeutic agent, radiation therapy, a cancer therapy, an immunotherapy, or a cancer vaccine, a cytokine, a toxin, a pro-apoptotic protein or a chemotherapeutic agent.

29. The use of claim 27 or 28, wherein the use comprises co-administering a cancer vaccine, and wherein the cancer vaccine recognizes one or more tumor antigens expressed on cancer cells, preferably, wherein the tumor antigen is selected from: MAGE-A1, MAGE-A2, MAGE-A3, MAGE-A4, MAGE-A5, MAGE-A6, MAGE-A7, MAGE-A8, MAGE-A9, MAGE-A10, MAGE-A11, MAGE-A12, GAGE-I, GAGE-2, GAGE-3, GAGE-4, GAGE-5, GAGE-6, GAGE-7, GAGE-8, BAGE-I, RAGE-1, LB33/MUM-1, PRAME, NAG, MAGE-Xp2 (MAGE-B2), MAGE-Xp3 (MAGE-B3), MAGE-Xp4 (MAGE-B4), MAGE-C1/CT7, MAGE-C2, NY-ESO-I, LAGE-I, SSX-I, SSX-2(HOM-MEL-40), SSX-3, SSX-4, SSX-5, SCP-I and XAGE, melanocyte differentiation antigens, p53, ras, CEA, MUC1, PMSA, PSA, tyrosinase, Melan-A, MART-1, gp100, gp75, alpha-actinin-4, Bcr-Abl fusion protein, Casp-8, beta-catenin, cdc27, cdk4, cdkn2a, coa-1, dek-can fusion protein, EF2, ETV6-AML1 fusion protein, LDLR-fucosyltransferaseAS fusion protein, HLA-A2, HLA-A11, hsp70-2, KIAAO205, Mart2, Mum-2, and 3, neo-PAP, myosin class I, OS-9, pml-RAR alpha fusion protein, PTPRK, K-ras, N-ras, Triosephosphate isomerase, GnTV, Herv-K-mel, NA-88, SP17, and TRP2-Int2, (MART-1), E2A-PRL, H4-RET, IGH-IGK, MYL-RAR, Epstein Barr virus antigens, EBNA, human papillomavirus (HPV) antigens E6 and E7, TSP-180, MAGE-4, MAGE-5, MAGE-6, p185erbB2, p180erbB-3, c-met, nm-23H1, PSA, TAG-72-4, CA 19-9, CA 72-4, CAM 17.1, NuMa, K-ras, alpha.-fetoprotein, 13HCG, BCA225, BTAA, CA 125, CA 15-3 (CA 27.29BCAA), CA 195, CA 242, CA-50, CAM43, CD68\KP1, CO-029, FGF-5, G250, Ga733 (EpCAM), HTgp-175, M344, MA-50, MG7-Ag, MOV18, NB\170K, NY-CO-1, RCAS1, SDCCAG16, TA-90 (Mac-2 binding proteincyclophilin C-associated protein), TAAL6, TAG72, TLP, TPS, tyrosinase related proteins, TRP-1, TRP-2, or mesothelin.

30. The use of claim 28, wherein use comprises co-administering another anti-cancer therapy selected from: aspirin, sulindac, curcumin, alkylating agents including: nitrogen mustards, such as mechlor-ethamine, cyclophosphamide, ifosfamide, melphalan and chlorambucil; nitrosoureas, such as carmustine (BCNU), lomustine (CCNU), and semustine (methyl-CCNU); thylenimines/methylmelamine such as thriethylenemelamine (TEM), triethylene, thiophosphoramide (thiotepa), hexamethylmelamine (HMM, altretamine); alkyl sulfonates such as busulfan; triazines such as dacarbazine (DTIC); antimetabolites including folic acid analogs such as methotrexate and trimetrexate, pyrimidine analogs such as 5-fluorouracil, fluorodeoxyuridine, gemcitabine, cytosine arabinoside (AraC, cytarabine), 5-azacytidine, 2,2′-difluorodeoxycytidine, purine analogs such as 6-mercaptopurine, 6-thioguanine, azathioprine, 2′-deoxycoformycin (pentostatin), erythrohydroxynonyladenine (EHNA), fludarabine phosphate, and 2-chlorodeoxyadenosine (cladribine, 2-CdA); natural products including antimitotic drugs such as paclitaxel, vinca alkaloids including vinblastine (VLB), vincristine, and vinorelbine, taxotere, estramustine, and estramustine phosphate; epipodophylotoxins such as etoposide and teniposide; antibiotics, such as actimomycin D, daunomycin (rubidomycin), doxorubicin, mitoxantrone, idarubicin, bleomycins, plicamycin (mithramycin), mitomycinC, and actinomycin; enzymes such as L-asparaginase, cytokines such as interferon (IFN)-gamma, tumor necrosis factor (TNF)-alpha, TNF-beta and GM-CSF, anti-angiogenic factors, such as angiostatin and endostatin, inhibitors of FGF or VEGF such as soluble forms of receptors for angiogenic factors, including soluble VGF/VEGF receptors, platinum coordination complexes such as cisplatin and carboplatin, anthracenediones such as mitoxantrone, substituted urea such as hydroxyurea, methylhydrazine derivatives including N-methylhydrazine (MIH) and procarbazine, adrenocortical suppressants such as mitotane (o,p′-DDD) and aminoglutethimide; hormones and antagonists including adrenocorticosteroid antagonists such as prednisone and equivalents, dexamethasone and aminoglutethimide; progestin such as hydroxyprogesterone caproate, medroxyprogesterone acetate and megestrol acetate; estrogen such as diethylstilbestrol and ethinyl estradiol equivalents; antiestrogen such as tamoxifen; androgens including testosterone propionate and fluoxymesterone/equivalents; antiandrogens such as flutamide, gonadotropin-releasing hormone analogs and leuprolide; non-steroidal antiandrogens such as flutamide; kinase inhibitors, histone deacetylase inhibitors, methylation inhibitors, proteasome inhibitors, monoclonal antibodies, oxidants, anti-oxidants, telomerase inhibitors, BH3 mimetics, ubiquitin ligase inhibitors, stat inhibitors and receptor tyrosin kinase inhibitors such as imatinib mesylate (marketed as Gleevac or Glivac) and erlotinib (an EGF receptor inhibitor) now marketed as Tarveca; and anti-virals such as oseltamivir phosphate, Amphotericin B, and palivizumab.

31. The use of any one of claims 28-30, wherein the anti-HVEM antibody is co-administered with a molecule selected from: (a) an anti-CXCL12 antibody; (b) an anti-CXCR4 antibody; (c) an anti-CD47 antibody; (d) a checkpoint inhibitor antibody, preferably an anti-PD-1 antibody, an anti-PD-L1 antibody, an anti-CTLA-4 antibody, an anti-TIM-3 antibody, and/or an anti-LAG3 antibody, (e) an anti-T-cell co-receptor antibody (e.g., an anti-4-1 BB (CD137) antibody or an anti-ICOS (CD278) antibody); or (f) an anti-neoantigen antibody.

32. The use of claim 31, wherein the anti-HVEM antibody is co-administered with an anti-neoantigen antibody, and the neoantigen is selected from: MAGE-A1, MAGE-A2, MAGE-A3, MAGE-A4, MAGE-A5, MAGE-A6, MAGE-A7, MAGE-A8, MAGE-A9, MAGE-A10, MAGE-A11, MAGE-A12, GAGE-I, GAGE-2, GAGE-3, GAGE-4, GAGE-5, GAGE-6, GAGE-7, GAGE-8, BAGE-I, RAGE-1, LB33/MUM-1, PRAME, NAG, MAGE-Xp2 (MAGE-B2), MAGE-Xp3 (MAGE-B3), MAGE-Xp4 (MAGE-B4), MAGE-C1/CT7, MAGE-C2, NY-ESO-I, LAGE-1, SSX-I, SSX-2(HOM-MEL-40), SSX-3, SSX-4, SSX-5, SCP-1 and XAGE, melanocyte differentiation antigens, p53, ras, CEA, MUC1, PMSA, PSA, tyrosinase, Melan-A, MART-1, gp100, gp75, alpha-actinin-4, Bcr-Abl fusion protein, Casp-8, beta-catenin, cdc27, cdk4, cdkn2a, coa-1, dek-can fusion protein, EF2, ETV6-AML1 fusion protein, LDLR-fucosyltransferaseAS fusion protein, HLA-A2, HLA-A11, hsp70-2, KIAA0205, Mart2, Mum-2, and 3, neo-PAP, myosin class I, OS-9, pml-RAR alpha fusion protein, PTPRK, K-ras, N-ras, Triosephosphate isomerase, GnTV, Herv-K-mel, NA-88, SP17, and TRP2-Int2, (MART-1), E2A-PRL, H4-RET, IGH-IGK, MYL-RAR, Epstein Barr virus antigens, EBNA, human papillomavirus (HPV) antigens E6 and E7, TSP-180, MAGE-4, MAGE-5, MAGE-6, p185erbB2, p180erbB-3, c-met, nm-23H1, PSA, TAG-72-4, CA 19-9, CA 72-4, CAM 17.1, NuMa, K-ras, alpha.-fetoprotein, 13HCG, BCA225, BTAA, CA 125, CA 15-3 (CA 27.29\BCAA), CA 195, CA 242, CA-50, CAM43, CD68\KP1, CO-029, FGF-5, G250, Ga733 (EpCAM), HTgp-175, M344, MA-50, MG7-Ag, MOV18, NB\170K, NY-CO-1, RCAS1, SDCCAG16, TA-90 (Mac-2 binding proteincyclophilin C-associated protein), TAAL6, TAG72, TLP, TPS, tyrosinase related proteins, TRP-1, TRP-2, or mesothelin.

33. The use of any one of claims 28-32, wherein the co-administration occurs simultaneously, separately, or sequentially with the anti-HVEM antibody.

34. A method of detecting HVEM in vitro in a sample, comprising contacting the sample with the antibody of any one of claims 1-19.
